(19) United States
(12) Patent Application Publication
(10) Pub. No.: US 2011/0283420 A1
(43) Pub. Date: Nov. 17, 2011

(54) PLANTS HAVING ENHANCED YIELD-RELATED TRAITS AND A METHOD FOR MAKING THE SAME

(75) Inventors: Yves Hatzfeld, Lille (FR); Ana Isabel Sanz Molinero, Gentbrugge (BE); Steven Vandenabeele, Oudenaarde (BE); Christophe Reuzeau, Tocan Saint Apre (FR)

(73) Assignee: BASF Plant Science Company GmbH, Ludwigshafen (DE)

(21) Appl. No.: 13/146,515

(22) PCT Filed: Jan. 13, 2010
(86) PCT No.: PCT/EP10/50310

§ 371 Date: Jul. 27, 2011

Related U.S. Application Data
(60) Provisional application No. 61/151,517, filed on Feb. 11, 2009.
(60) Provisional application No. 61/151,523, filed on Feb. 11, 2009.
(60) Provisional application No. 61/151,525, filed on Feb. 11, 2009.
(60) Provisional application No. 61/151,521, filed on Feb. 11, 2009.

(30) Foreign Application Priority Data
Jan. 28, 2009 (EP) 09151545.2
Jan. 28, 2009 (EP) 09151556.9
Jan. 28, 2009 (EP) 09151557.7
Jan. 28, 2009 (EP) 09151570.0

(51) Int. Cl. A01H 1/06; A01H 5/10; C07K 2/00; C12N 5/10; C07H 21/04; A01H 5/00; C12N 15/63

(52) U.S. Cl. 800/290; 800/278; 800/298; 435/320.1; 435/419; 800/320.2; 800/320.1; 800/320; 800/320.3; 536/23.6; 530/300

(57) ABSTRACT

The present invention relates generally to the field of molecular biology and concerns a method for enhancing various economically important yield-related traits in plants. More specifically, the present invention concerns a method for enhancing yield-related traits in plants by modulating expression in a plant of a nucleic acid encoding a HSFA4 or HSFA5 (Heat Shock Factor of the class A4 or A5) polypeptide. The present invention also concerns plants having modulated expression of a nucleic acid encoding a HSFA4 or a HSFA5 polypeptide, which plants have enhanced yield-related traits relative to control plants. The invention also provides constructs comprising the same, useful in performing the methods of the invention.

Furthermore, the present invention relates generally to the field of molecular biology and concerns a method for enhancing various yield-related traits by modulating expression in a plant of a nucleic acid encoding an oligopeptide transporter protein (OPT4-like) polypeptide. The present invention also concerns plants having modulated expression of a nucleic acid encoding an OPT4-like polypeptide, which plants have enhanced yield-related traits relative to corresponding wild type plants or other control plants. The invention also provides constructs useful in the methods of the invention. The invention also provides hitherto unknown OPT4-like-encoding nucleic acids, and constructs comprising the same, useful in performing the methods of the invention.

Furthermore, the present invention relates generally to the field of molecular biology and concerns a method for enhancing various yield-related traits by modulating expression in a plant of a nucleic acid encoding a plastochron2-like (PLA2-like) polypeptide. The present invention also concerns plants having modulated expression of a nucleic acid encoding a PLA2-like polypeptide, which plants have enhanced yield-related traits relative to corresponding wild type plants or other control plants. The invention also provides constructs useful in the methods of the invention.

Furthermore, the present invention relates generally to the field of molecular biology and concerns a method for enhancing yield-related traits in plants by modulating expression in a plant of a nucleic acid encoding a Wuschel related homeobox 1-like (WOX1-like) polypeptide. The present invention also concerns plants having modulated expression of a nucleic acid encoding a WOX1-like polypeptide, which plants have enhanced yield-related traits relative to corresponding wild type plants or other control plants. The invention also provides constructs useful in the methods of the invention.

[0001] The present invention relates generally to the field of molecular biology and concerns a method for enhancing various economically important yield-related traits in plants. More specifically, the present invention concerns a method for enhancing yield-related traits in plants by modulating expression in a plant of a nucleic acid encoding a HSFA4 or HSFA5 (Heat Shock Factor of the class A4 or A5) polypeptide. The present invention also concerns plants having modulated expression of a nucleic acid encoding a HSFA4 or a HSFA5 polypeptide, which plants have enhanced yield-related traits relative to control plants. The invention also provides constructs comprising the same, useful in performing the methods of the invention.

[0002] Furthermore, the present invention relates generally to the field of molecular biology and concerns a method for enhancing various yield-related traits by modulating expression in a plant of a nucleic acid encoding an oligopeptide transporter protein (OPT4-like) polypeptide. The present invention also concerns plants having modulated expression of a nucleic acid encoding an OPT4-like polypeptide, which plants have enhanced yield-related traits relative to corresponding wild type plants or other control plants. The invention also provides constructs useful in the methods of the invention. The invention also provides hitherto unknown OPT4-like-encoding nucleic acids, and constructs comprising the same, useful in performing the methods of the invention.

[0003] Furthermore, the present invention relates generally to the field of molecular biology and concerns a method for enhancing various yield-related traits by modulating expression in a plant of a nucleic acid encoding a plastochron2-like (PLA2-like) polypeptide. The present invention also concerns plants having modulated expression of a nucleic acid encoding a PLA2-like polypeptide, which plants have enhanced yield-related traits relative to corresponding wild type plants or other control plants. The invention also provides constructs useful in the methods of the invention.

[0004] Furthermore, the present invention relates generally to the field of molecular biology and concerns a method for enhancing yield-related traits in plants by modulating expression in a plant of a nucleic acid encoding a Wuschel related homeobox 1-like (WOX1-like) polypeptide. The present invention also concerns plants having modulated expression of a nucleic acid encoding a WOX1-like polypeptide, which plants have enhanced yield-related traits relative to corresponding wild type plants or other control plants. The invention also provides constructs useful in the methods of the invention.

[0005] The ever-increasing world population and the dwindling supply of arable land available for agriculture fuels research towards increasing the efficiency of agriculture. Conventional means for crop and horticultural improvements utilise selective breeding techniques to identify plants having desirable characteristics. However, such selective breeding techniques have several drawbacks, namely that these techniques are typically labour intensive and result in plants that often contain heterogeneous genetic components that may not always result in the desirable trait being passed on from parent plants. Advances in molecular biology have allowed mankind to modify the germplasm of animals and plants. Genetic engineering of plants entails the isolation and manipulation of genetic material (typically in the form of DNA or RNA) and the subsequent introduction of that genetic material into a plant. Such technology has the capacity to deliver crops or plants having various improved economic, agronomic or horticultural traits.

[0006] A trait of particular economic interest is increased yield. Yield is normally defined as the measurable produce of economic value from a crop. This may be defined in terms of quantity and/or quality. Yield is directly dependent on several factors, for example, the number and size of the organs, plant architecture (for example, the number of branches), seed production, leaf senescence and more. Root development, nutrient uptake, stress tolerance and early vigour may also be important factors in determining yield. Optimizing the above-mentioned factors may therefore contribute to increasing crop yield.

[0007] Seed yield is a particularly important trait, since the seeds of many plants are important for human and animal nutrition. Crops such as corn, rice, wheat, canola and soybean account for over half the total human caloric intake, whether through direct consumption of the seeds themselves or through consumption of meat products raised on processed seeds. They are also a source of sugars, oils and many kinds of metabolites used in industrial processes. Seeds contain an embryo (the source of new shoots and roots) and an endosperm (the source of nutrients for embryo growth during germination and during early growth of seedlings). The development of a seed involves many genes, and requires the transfer of metabolites from the roots, leaves and stems into the growing seed. The endosperm, in particular, assimilates the metabolic precursors of carbohydrates, oils and proteins and synthesizes them into storage macromolecules to fill out the grain.

[0008] Plant biomass is yield for forage crops like alfalfa, silage corn and hay. Many proxies for yield have been used in grain crops. Chief amongst these are estimates of plant size. Plant size can be measured in many ways depending on species and developmental stage, but include total plant dry weight, above-ground dry weight, above-ground fresh weight, leaf area, stem volume, plant height, rosette diameter, leaf length, root length, root mass, tiller number and leaf number. Many species maintain a conservative ratio between the size of different parts of the plant at a given developmental stage. These allometric relationships are used to extrapolate from one of these measures of size to another (e.g. Tittonell et al 2005 Agric Ecosys & Environ 105: 213). Plant size at an early developmental stage will typically correlate with plant size later in development. A larger plant with a greater leaf area can typically absorb more light and carbon dioxide than a smaller plant and therefore will likely gain a greater weight during the same period (Fasoula & Tollenaar 2005 Maydica 50:39). This is in addition to the potential continuation of the micro-environmental or genetic advantage that the plant had to achieve the larger size initially. There is a strong genetic component to plant size and growth rate (e.g. ter Steege et al 2005 Plant Physiology 139:1078), and so for a range of diverse genotypes plant size under one environmental condition is likely to correlate with size under another (Hittalmani et al 2003 Theoretical Applied Genetics 107:679). In this way a standard environment is used as a proxy for the diverse and dynamic environments encountered at different locations and times by crops in the field.

[0009] Another important trait for many crops is early vigour. Improving early vigour is an important objective of modern rice breeding programs in both temperate and tropical rice cultivars. Long roots are important for proper soil anchorage in water-seeded rice. Where rice is sown directly into flooded fields, and where plants must emerge rapidly through water, longer shoots are associated with vigour. Where drill-seeding is practiced, longer mesocotyls and coleoptiles are important for good seedling emergence. The ability to engineer early vigour into plants would be of great importance in agriculture. For example, poor early vigour has been a limitation to the introduction of maize (Zea mays L.) hybrids based on Corn Belt germplasm in the European Atlantic.

[0010] Harvest index, the ratio of seed yield to aboveground dry weight, is relatively stable under many environmental conditions and so a robust correlation between plant size and grain yield can often be obtained (e.g. Rebetzke et al 2002 Crop Science 42:739). These processes are intrinsically linked because the majority of grain biomass is dependent on current or stored photosynthetic productivity by the leaves and stem of the plant (Gardener et al 1985 Physiology of Crop Plants. Iowa State University Press, pp 68-73). Therefore, selecting for plant size, even at early stages of development, has been used as an indicator for future potential yield (e.g. Tittonell et al 2005 Agric Ecosys & Environ 105: 213). When testing for the impact of genetic differences on stress tolerance, the ability to standardize soil properties, temperature, water and nutrient availability and light intensity is an intrinsic advantage of greenhouse or plant growth chamber environments compared to the field. However, artificial limitations on yield due to poor pollination due to the absence of wind or insects, or insufficient space for mature root or canopy growth, can restrict the use of these controlled environments for testing yield differences. Therefore, measurements of plant size in early development, under standardized conditions in a growth chamber or greenhouse, are standard practices to provide indication of potential genetic yield advantages.

[0011] A further important trait is that of improved abiotic stress tolerance. Abiotic stress is a primary cause of crop loss worldwide, reducing average yields for most major crop plants by more than 50% (Wang et al., Planta (2003) 218: 1-14). Abiotic stresses may be caused by drought, salinity, extremes of temperature, chemical toxicity, excess or deficiency of nutrients (macroelements and/or microelements), radiation and oxidative stress. The ability to improve plant tolerance to abiotic stress would be of great economic advantage to farmers worldwide and would allow for the cultivation of crops during adverse conditions and in territories where cultivation of crops may not otherwise be possible.

[0012] Crop yield may therefore be increased by optimising one of the above-mentioned factors.

[0013] Depending on the end use, the modification of certain yield traits may be favoured over others. For example for applications such as forage or wood production, or bio-fuel resource, an increase in the vegetative parts of a plant may be desirable, and for applications such as flour, starch or oil production, an increase in seed parameters may be particularly desirable. Even amongst the seed parameters, some may be favoured over others, depending on the application. Various mechanisms may contribute to increasing seed yield, whether that is in the form of increased seed size or increased seed number.

[0014] One approach to increasing yield (seed yield and/or biomass) in plants may be through modification of the inherent growth mechanisms of a plant, such as the cell cycle or various signalling pathways involved in plant growth or in defense mechanisms.

[0015] It has now been found that various growth characteristics may be improved in plants by modulating expression in a plant of a nucleic acid encoding a HSFA4 or a HSFA5 (Heat shock factor of group A4 or A5) in a plant.

[0016] It has now been found that various yield-related traits may be enhanced in plants by modulating expression in a plant of a nucleic acid encoding an OPT4-like polypeptide.

[0017] It has now been found that various growth characteristics may be improved in plants by modulating expression in a plant of a nucleic acid encoding a PLA2-like polypeptide in a plant.

[0018] It has now been found that various growth characteristics may be improved in plants by modulating expression in a plant of a nucleic acid encoding a WOX1-like polypeptide.

### BACKGROUND

### 1. Heat Stress Transcription Factors (HSF)

[0019] Heat stress transcription factors (HSF) mediate activation of gene expression in response to heat stress and to a large number of chemical sensors. They bind to specific motifs present in the promoter of the target gene. The binding motifs in the promoter are called heat stress elements (HSE) and are characterized by the palindromic sequence: 5′AGAAnnTTCT3′ where nn represents any nucleotide in a variable number.

[0020] HSF have a modular structure with an N-terminal DNA binding domain, and a C-terminal activator motif (AHA motif) having the consensus sequence FWXX(F/L)(F/I/L) and a cluster of basic amino acid residues essential for nuclear export. Additionally nuclear localization signals in HSF are involved in nuclear import. Under normal physiological temperature, HSF is a homo-trimeric cytoplasmic protein, but heat shock results in relocalisation of the HSF to the nucleus.

[0021] Unlike other eukaryotes, the HSF family in plants shows a strong diversification with highly defined expression patterns. Based on the structure of the oligomerization domain, plant heat shock factors are classified in three classes, class A, B and C. Phylogenetic relationship of plant HSF further identifies evolutionary relationship among HSF within each class. Within class A up to nine evolutionary clades have been defined (Koskull-Doring et al, 2007, Trends in Plant Science Vol. 12, No. 10 1360-1385). Genes within the same evolutionary clade share high structural similarity and are assumed to have equivalent biological function. HSFA4 and HSFA5 belong to two closely related clades of the A class. In tomato and Arabidopsis members of the HSFA4 clade have been shown to act as a potent activator of the heat gene expression, whereas members of the clade of HSFA5 inhibit HSFA4 activity (Baniwal et al; 2007 Plant Cell 282, 3605-3613).

### 2. Oligopeptide Transporter (OPT)

[0022] All living organisms depend on a multitude of transporters to survive. The transport of substrates is essential to processes, such as biosynthesis, reproduction, cell-to-cell communication, respiration, photosynthesis, pathogen defense, and nutrient metabolism. In plants, numerous families of transporters have been identified, with functions related to the above-mentioned aspects of plant survival. Vasconcelos et al., 2008 (The Plant Genome November Vol. 1, No. 2).

[0023] Peptide transporters can be divided into one of three categories: the ATP binding cassette (ABC) superfamily, the peptide transporter superfamily (PTR), and the oligopeptide transporter (OPT) family. The differences between these three families are mainly in the type of substrate they transport and their specificity.

[0024] The plant ABC proteins are primarily pumps, which use the energy of ATP hydrolysis to drive the transport of different substrates such as peptides, lipids, heavy metal chelates, polysaccharides, alkaloids, steroids, inorganic acids, and glutathione conjugates.

[0025] The PTR family members have been shown to transport di- and tripeptides, as well as nitrate.

[0026] The OPT family of transporters was first identified in Schizosaccharomyces pombe, and since then they also have been found in bacteria, plants, and archaea, but not in animals. The OPTs have been further divided into different subfamilies, with the prokaryotic proteins clustering loosely in one branch, whereas the eukaryotic proteins divide into four clusters: two plant clusters and two fungal clusters. The two plant clusters are the yellow stripe (YS) and the peptide transport (PT) clades. The YS clade includes the YSL (yellow stripe-like) genes, described in Arabidopsis, rice, and Zea mays L.

[0027] Several of the YSL genes are implicated in the transport of metals bound to nicotianamine (NA). Plant OPTs belonging to the PT clade (PT-OPTs) have been characterized in Arabidopsis, rice, and Brassica juncea (L.) Czern., and they have been implicated in embryo development, heavy metal detoxification, seed germination, and long distance nitrogen allocation. It has been shown that Arabidopsis PT-OPTs are expressed in different parts of the plant, including the vascular tissue, where they are speculated to contribute to the long distance transport of peptides. Vasconcelos et al., 2008.

[0028] Koh et al, 2002 (Plant Physiology, January 2002, Vol. 128, pp. 21-29) report an OPT gene family in Arabidopsis thaliana, revealing nine OPT orthologues (AtOPT1 to AtOPT9). The authors found two motifs—NPG and KIPPR—highly conserved among all OPT members.

[0029] Surprisingly, it has now been found that modulating expression of a nucleic acid encoding an OPT4-like polypeptide gives plants having enhanced yield-related traits relative to control plants.

### 3. Plastochron (PLA)

[0030] PLA2 is a RNA binding protein involved in the regulation of the way leaves are initiated and the speed of maturation. It is the rice orthologue to TE1 from maize. Kawakatsu et al., 2006 (The Plant Cell, Vol. 18, 612-625, March 2006).

[0031] PLA1 is a Cytochrome P450, also involved in the regulation of the way leaves are initiated and the speed of maturation. It has no structural relation with PLA2, and does not belong to the same regulatory pathway.

[0032] Surprisingly, it has now been found that modulating expression of a nucleic acid encoding a PLA2-like polypeptide gives plants having enhanced yield-related traits relative to control plants.

### 4. WUSCHEL-Related Homeobox 1 (WOX1)

[0033] WUSCHEL-related homeobox 1 (WOX1) is expressed in the initiating vascular primordium of the cotyledons during heart and torpedo stages. WUSCHEL-related orthologues are involved in the maintenance of the central shoot apical meristem. 16 WUS/WOX genes have been identified in Arabidopsis.

### SUMMARY

### 1. HSF Polypeptides

[0034] Surprisingly, it has now been found that modulating expression of a nucleic acid encoding a HSFA4 or a HSFA5 polypeptide gives plants having enhanced yield-related traits, relative to control plants.

[0035] According one embodiment, there is provided a method for enhancing yield related traits of a plant relative to control plants, comprising modulating expression of a nucleic acid encoding a HSFA4 or a HSFA5 polypeptide in a plant.

### 2. OPT4-Like Polypeptides

[0036] According one embodiment, there is provided a method for enhancing yield-related traits in plants relative to control plants, comprising modulating expression of a nucleic acid encoding an OPT4-like polypeptide in a plant.

[0037] According to another embodiment of the present invention, there is provided hitherto unknown OPT4-like-encoding nucleic acids, and constructs comprising the same, useful in performing the methods of the invention.

### 3. PLA2-Like Polypeptides

[0038] Surprisingly, it has now been found that modulating expression of a nucleic acid encoding a PLA2-like polypeptide gives plants having enhanced yield-related traits relative to control plants.

[0039] According to one embodiment, there is provided a method for enhancing yield-related traits relative to control plants, comprising modulating expression of a nucleic acid encoding a PLA2-like polypeptide in a plant.

### 4. WOX1-Like Polypeptides

[0040] Surprisingly, it has now been found that modulating expression of a nucleic acid encoding a WOX1-like polypeptide gives plants having enhanced yield-related traits relative to control plants.

[0041] According one embodiment, there is provided a method for enhancing yield-related traits relative to control plants, comprising modulating expression of a nucleic acid encoding a WOX1-like polypeptide in a plant.

### DEFINITIONS

### Polypeptide(s)/Protein(s)

[0042] The terms “polypeptide” and “protein” are used interchangeably herein and refer to amino acids in a polymeric form of any length, linked together by peptide bonds.

Polynucleotide(s)/Nucleic acid(s)/Nucleic Acid Sequence(s)/Nucleotide Sequence(s)

[0043] The terms “polynucleotide(s)”, “nucleic acid sequence(s)”, “nucleotide sequence(s)”, “nucleic acid(s)”, “nucleic acid molecule” are used interchangeably herein and refer to nucleotides, either ribonucleotides or deoxyribonucleotides or a combination of both, in a polymeric unbranched form of any length.

### Homologue(s)

[0044] “Homologues” of a protein encompass peptides, oligopeptides, polypeptides, proteins and enzymes having amino acid substitutions, deletions and/or insertions relative to the unmodified protein in question and having similar biological and functional activity as the unmodified protein from which they are derived.

[0045] A deletion refers to removal of one or more amino acids from a protein.

[0046] An insertion refers to one or more amino acid residues being introduced into a predetermined site in a protein. Insertions may comprise N-terminal and/or C-terminal fusions as well as intra-sequence insertions of single or multiple amino acids. Generally, insertions within the amino acid sequence will be smaller than N- or C-terminal fusions, of the order of about 1 to 10 residues. Examples of N- or C-terminal fusion proteins or peptides include the binding domain or activation domain of a transcriptional activator as used in the yeast two-hybrid system, phage coat proteins, (histidine)-6-tag, glutathione S-transferase-tag, protein A, maltose-binding protein, dihydrofolate reductase, Tag•100 epitope, c-myc epitope, FLAG®-epitope, lacZ, CMP (calmodulin-binding peptide), HA epitope, protein C epitope and VSV epitope.

[0047] A substitution refers to replacement of amino acids of the protein with other amino acids having similar properties (such as similar hydrophobicity, hydrophilicity, antigenicity, propensity to form or break α-helical structures or β-sheet structures). Amino acid substitutions are typically of single residues, but may be clustered depending upon functional constraints placed upon the polypeptide and may range from 1 to 10 amino acids; insertions will usually be of the order of about 1 to 10 amino acid residues. The amino acid substitutions are preferably conservative amino acid substitutions. Conservative substitution tables are well known in the art (see for example Creighton (1984) Proteins. W.H. Freeman and Company (Eds) and Table 1 below).

TABLE 1
Examples of conserved amino acid substitutions

| | Conservative | | Conservative |
|---|---|---|---|
| Residue | Substitutions | Residue | Substitutions |
| Ala | Ser | Leu | Ile; Val |
| Arg | Lys | Lys | Arg; Gln |
| Asn | Gln; His | Met | Leu; Ile |
| Asp | Glu | Phe | Met; Leu; Tyr |
| Gln | Asn | Ser | Thr; Gly |
| Cys | Ser | Thr | Ser; Val |
| Glu | Asp | Trp | Tyr |
| Gly | Pro | Tyr | Trp; Phe |
| His | Asn; Gln | Val | Ile; Leu |
| Ile | Leu, Val | | |

[0048] Amino acid substitutions, deletions and/or insertions may readily be made using peptide synthetic techniques well known in the art, such as solid phase peptide synthesis and the like, or by recombinant DNA manipulation. Methods for the manipulation of DNA sequences to produce substitution, insertion or deletion variants of a protein are well known in the art. For example, techniques for making substitution mutations at predetermined sites in DNA are well known to those skilled in the art and include M13 mutagenesis, T7-Gen in vitro mutagenesis (USB, Cleveland, Ohio), QuickChange Site Directed mutagenesis (Stratagene, San Diego, Calif.), PCR-mediated site-directed mutagenesis or other site-directed mutagenesis protocols.

### Derivatives

[0049] “Derivatives” include peptides, oligopeptides, polypeptides which may, compared to the amino acid sequence of the naturally-occurring form of the protein, such as the protein of interest, comprise substitutions of amino acids with non-naturally occurring amino acid residues, or additions of non-naturally occurring amino acid residues. “Derivatives” of a protein also encompass peptides, oligopeptides, polypeptides which comprise naturally occurring altered (glycosylated, acylated, prenylated, phosphorylated, myristoylated, sulphated etc.) or non-naturally altered amino acid residues compared to the amino acid sequence of a naturally-occurring form of the polypeptide. A derivative may also comprise one or more non-amino acid substituents or additions compared to the amino acid sequence from which it is derived, for example a reporter molecule or other ligand, covalently or non-covalently bound to the amino acid sequence, such as a reporter molecule which is bound to facilitate its detection, and non-naturally occurring amino acid residues relative to the amino acid sequence of a naturally-occurring protein. Furthermore, “derivatives” also include fusions of the naturally-occurring form of the protein with tagging peptides such as FLAG, HIS6 or thioredoxin (for a review of tagging peptides, see Terpe, Appl. Microbiol. Biotechnol. 60, 523-533, 2003).

### Orthologue(s)/Paralogue(s)

[0050] Orthologues and paralogues encompass evolutionary concepts used to describe the ancestral relationships of genes. Paralogues are genes within the same species that have originated through duplication of an ancestral gene; orthologues are genes from different organisms that have originated through speciation, and are also derived from a common ancestral gene.

### Domain, Motif/Consensus Sequence/Signature

[0051] The term “domain” refers to a set of amino acids conserved at specific positions along an alignment of sequences of evolutionarily related proteins. While amino acids at other positions can vary between homologues, amino acids that are highly conserved at specific positions indicate amino acids that are likely essential in the structure, stability or function of a protein. Identified by their high degree of conservation in aligned sequences of a family of protein homologues, they can be used as identifiers to determine if any polypeptide in question belongs to a previously identified polypeptide family.

[0052] The term “motif” or “consensus sequence” or “signature” refers to a short conserved region in the sequence of evolutionarily related proteins. Motifs are frequently highly conserved parts of domains, but may also include only part of the domain, or be located outside of conserved domain (if all of the amino acids of the motif fall outside of a defined domain).

[0053] Specialist databases exist for the identification of domains, for example, SMART (Schultz et al. (1998) Proc. Natl. Acad. Sci. USA 95, 5857-5864; Letunic et al. (2002) Nucleic Acids Res 30, 242-244), InterPro (Mulderi et al., (2003) Nucl. Acids. Res. 31, 315-318), Prosite (Bucher and Bairoch (1994), A generalized profile syntax for biomolecular sequences motifs and its function in automatic sequence interpretation. (In) ISMB-94; Proceedings 2nd International Conference on Intelligent Systems for Molecular Biology. Altman R., Brutlag D., Karp P., Lathrop R., Searls D., Eds., pp 53-61, AAAI Press, Menlo Park; Hula et al., Nucl. Acids. Res. 32:D134-D137, (2004)), or Pfam (Bateman et al., Nucleic Acids Research 30(1): 276-280 (2002)). A set of tools for in silico analysis of protein sequences is available on the ExPASy proteomics server (Swiss Institute of Bioinformatics (Gasteiger et al., ExPASy: the proteomics server for in-depth protein knowledge and analysis, Nucleic Acids Res. 31:3784-3788 (2003)). Domains or motifs may also be identified using routine techniques, such as by sequence alignment.

[0054] Methods for the alignment of sequences for comparison are well known in the art, such methods include GAP, BESTFIT, BLAST, FASTA and TFASTA. GAP uses the algorithm of Needleman and Wunsch ((1970) J Mol Biol 48: 443-453) to find the global (i.e. spanning the complete sequences) alignment of two sequences that maximizes the number of matches and minimizes the number of gaps. The BLAST algorithm (Altschul et al. (1990) J Mol Biol 215: 403-10) calculates percent sequence identity and performs a statistical analysis of the similarity between the two sequences. The software for performing BLAST analysis is publicly available through the National Centre for Biotechnology Information (NCBI). Homologues may readily be identified using, for example, the ClustalW multiple sequence alignment algorithm (version 1.83), with the default pairwise alignment parameters, and a scoring method in percentage. Global percentages of similarity and identity may also be determined using one of the methods available in the MatGAT software package (Campanella et al., BMC Bioinformatics. 2003 Jul. 10; 4:29. MatGAT: an application that generates similarity/identity matrices using protein or DNA sequences.). Minor manual editing may be performed to optimise alignment between conserved motifs, as would be apparent to a person skilled in the art. Furthermore, instead of using full-length sequences for the identification of homologues, specific domains may also be used. The sequence identity values may be determined over the entire nucleic acid or amino acid sequence or over selected domains or conserved motif(s), using the programs mentioned above using the default parameters. For local alignments, the Smith-Waterman algorithm is particularly useful (Smith T F, Waterman M S (1981) J. Mol. Biol 147(1); 195-7).

### Reciprocal BLAST

[0055] Typically, this involves a first BLAST involving BLASTing a query sequence (for example using any of the sequences listed in Table A of the Examples section) against any sequence database, such as the publicly available NCBI database. BLASTN or TBLASTX (using standard default values) are generally used when starting from a nucleotide sequence, and BLASTP or TBLASTN (using standard default values) when starting from a protein sequence. The BLAST results may optionally be filtered. The full-length sequences of either the filtered results or non-filtered results are then BLASTed back (second BLAST) against sequences from the organism from which the query sequence is derived. The results of the first and second BLASTs are then compared. A paralogue is identified if a high-ranking hit from the first blast is from the same species as from which the query sequence is derived, a BLAST back then ideally results in the query sequence amongst the highest hits; an orthologue is identified if a high-ranking hit in the first BLAST is not from the same species as from which the query sequence is derived, and preferably results upon BLAST back in the query sequence being among the highest hits.

[0056] High-ranking hits are those having a low E-value. The lower the E-value, the more significant the score (or in other words the lower the chance that the hit was found by chance). Computation of the E-value is well known in the art. In addition to E-values, comparisons are also scored by percentage identity. Percentage identity refers to the number of identical nucleotides (or amino acids) between the two compared nucleic acid (or polypeptide) sequences over a particular length. In the case of large families, ClustalW may be used, followed by a neighbour joining tree, to help visualize clustering of related genes and to identify orthologues and paralogues.

### Hybridisation

[0057] The term “hybridisation” as defined herein is a process wherein substantially homologous complementary nucleotide sequences anneal to each other. The hybridisation process can occur entirely in solution, i.e. both complementary nucleic acids are in solution. The hybridisation process can also occur with one of the complementary nucleic acids immobilised to a matrix such as magnetic beads, Sepharose beads or any other resin. The hybridisation process can furthermore occur with one of the complementary nucleic acids immobilised to a solid support such as a nitro-cellulose or nylon membrane or immobilised by e.g. photolithography to, for example, a siliceous glass support (the latter known as nucleic acid arrays or microarrays or as nucleic acid chips). In order to allow hybridisation to occur, the nucleic acid molecules are generally thermally or chemically denatured to melt a double strand into two single strands and/or to remove hairpins or other secondary structures from single stranded nucleic acids.

[0058] The term “stringency” refers to the conditions under which a hybridisation takes place. The stringency of hybridisation is influenced by conditions such as temperature, salt concentration, ionic strength and hybridisation buffer composition. Generally, low stringency conditions are selected to be about 30° C. lower than the thermal melting point (Tₘ) for the specific sequence at a defined ionic strength and pH. Medium stringency conditions are when the temperature is 20° C. below Tₘ, and high stringency conditions are when the temperature is 10° C. below Tₘ. High stringency hybridisation conditions are typically used for isolating hybridising sequences that have high sequence similarity to the target nucleic acid sequence. However, nucleic acids may deviate in sequence and still encode a substantially identical polypeptide, due to the degeneracy of the genetic code. Therefore medium stringency hybridisation conditions may sometimes be needed to identify such nucleic acid molecules.

[0059] The Tm is the temperature under defined ionic strength and pH, at which 50% of the target sequence hybridises to a perfectly matched probe. The Tₘ is dependent upon the solution conditions and the base composition and length of the probe. For example, longer sequences hybridise specifically at higher temperatures. The maximum rate of hybridisation is obtained from about 16° C. up to 32° C. below Tₘ. The presence of monovalent cations in the hybridisation solution reduce the electrostatic repulsion between the two nucleic acid strands thereby promoting hybrid formation; this effect is visible for sodium concentrations of up to 0.4M (for higher concentrations, this effect may be ignored). Formamide reduces the melting temperature of DNA-DNA and DNA-RNA duplexes with 0.6 to 0.7° C. for each percent formamide, and addition of 50% formamide allows hybridisation to be performed at 30 to 45° C., though the rate of hybridisation will be lowered. Base pair mismatches reduce the hybridisation rate and the thermal stability of the duplexes. On average and for large probes, the Tm decreases about 1° C. per % base mismatch. The Tm may be calculated using the following equations, depending on the types of hybrids:

1) DNA-DNA hybrids (Meinkoth and Wahl, Anal. Biochem., 138: 267-284, 1984):

Tₘ=81.5° C.+16.6×log₁₀ [Na⁺]^{a}+0.41×% [G/C^{b}]−500×[L^{c}]⁻¹−0.61×% formamide

2) DNA-RNA or RNA-RNA hybrids:

[0060] Tm=79.8+18.5(log₁₀ [Na⁺]^{a})+0.58(% G/C^{b})+11.8(% G/C^{b})²−820/L^{c}

3) oligo-DNA or oligo-RNA^{d} hybrids:
[0061] For <20 nucleotides: Tₘ=2 (Iₙ)
[0062] For 20-35 nucleotides: Tₘ=22+1.46 (Iₙ) ^{a} or for other monovalent cation, but only accurate in the 0.01-0.4 M range.^{b} only accurate for % GC in the 30% to 75% range.^{c} L=length of duplex in base pairs.^{d} oligo, oligonucleotide; Iₙ=effective length of primer=2×(no. of G/C)+(no. of A/T).

[0063] Non-specific binding may be controlled using any one of a number of known techniques such as, for example, blocking the membrane with protein containing solutions, additions of heterologous RNA, DNA, and SDS to the hybridisation buffer, and treatment with Rnase. For non-homologous probes, a series of hybridizations may be performed by varying one of (i) progressively lowering the annealing temperature (for example from 68° C. to 42° C.) or (ii) progressively lowering the formamide concentration (for example from 50% to 0%). The skilled artisan is aware of various parameters which may be altered during hybridisation and which will either maintain or change the stringency conditions.

[0064] Besides the hybridisation conditions, specificity of hybridisation typically also depends on the function of post-hybridisation washes. To remove background resulting from non-specific hybridisation, samples are washed with dilute salt solutions. Critical factors of such washes include the ionic strength and temperature of the final wash solution: the lower the salt concentration and the higher the wash temperature, the higher the stringency of the wash. Wash conditions are typically performed at or below hybridisation stringency. A positive hybridisation gives a signal that is at least twice of that of the background. Generally, suitable stringent conditions for nucleic acid hybridisation assays or gene amplification detection procedures are as set forth above. More or less stringent conditions may also be selected. The skilled artisan is aware of various parameters which may be altered during washing and which will either maintain or change the stringency conditions.

[0065] For example, typical high stringency hybridisation conditions for DNA hybrids longer than 50 nucleotides encompass hybridisation at 65° C. in 1×SSC or at 42° C. in 1×SSC and 50% formamide, followed by washing at 65° C. in 0.3×SSC. Examples of medium stringency hybridisation conditions for DNA hybrids longer than 50 nucleotides encompass hybridisation at 50° C. in 4×SSC or at 40° C. in 6×SSC and 50% formamide, followed by washing at 50° C. in 2×SSC. The length of the hybrid is the anticipated length for the hybridising nucleic acid. When nucleic acids of known sequence are hybridised, the hybrid length may be determined by aligning the sequences and identifying the conserved regions described herein. 1×SSC is 0.15M NaCl and 15 mM sodium citrate; the hybridisation solution and wash solutions may additionally include 5×Denhardt's reagent, 0.5-1.0% SDS, 100 μg/ml denatured, fragmented salmon sperm DNA, 0.5% sodium pyrophosphate.

[0066] For the purposes of defining the level of stringency, reference can be made to Sambrook et al. (2001) Molecular Cloning: a laboratory manual, 3^{rd} Edition, Cold Spring Harbor Laboratory Press, CSH, New York or to Current Protocols in Molecular Biology, John Wiley & Sons, N.Y. (1989 and yearly updates).

### Splice Variant

[0067] The term “splice variant” as used herein encompasses variants of a nucleic acid sequence in which selected introns and/or exons have been excised, replaced, displaced or added, or in which introns have been shortened or lengthened. Such variants will be ones in which the biological activity of the protein is substantially retained; this may be achieved by selectively retaining functional segments of the protein. Such splice variants may be found in nature or may be manmade. Methods for predicting and isolating such splice variants are well known in the art (see for example Foissac and Schiex (2005) BMC Bioinformatics 6: 25).

### Allelic Variant

[0068] Alleles or allelic variants are alternative forms of a given gene, located at the same chromosomal position. Allelic variants encompass Single Nucleotide Polymorphisms (SNPs), as well as Small Insertion/Deletion Polymorphisms (INDELs). The size of INDELs is usually less than 100 bp. SNPs and INDELs form the largest set of sequence variants in naturally occurring polymorphic strains of most organisms.

### Endogenous Gene

[0069] Reference herein to an “endogenous” gene not only refers to the gene in question as found in a plant in its natural form (i.e., without there being any human intervention), but also refers to that same gene (or a substantially homologous nucleic acid/gene) in an isolated form subsequently (re)introduced into a plant (a transgene). For example, a transgenic plant containing such a transgene may encounter a substantial reduction of the transgene expression and/or substantial reduction of expression of the endogenous gene. The isolated gene may be isolated from an organism or may be manmade, for example by chemical synthesis.

### Gene Shuffling/Directed Evolution

[0070] Gene shuffling or directed evolution consists of iterations of DNA shuffling followed by appropriate screening and/or selection to generate variants of nucleic acids or portions thereof encoding proteins having a modified biological activity (Castle et al., (2004) Science 304(5674): 1151-4; U.S. Pat. Nos. 5,811,238 and 6,395,547).

### Construct

[0071] Additional regulatory elements may include transcriptional as well as translational enhancers. Those skilled in the art will be aware of terminator and enhancer sequences that may be suitable for use in performing the invention. An intron sequence may also be added to the 5′untranslated region (UTR) or in the coding sequence to increase the amount of the mature message that accumulates in the cytosol, as described in the definitions section. Other control sequences (besides promoter, enhancer, silencer, intron sequences, 3′UTR and/or 5′UTR regions) may be protein and/or RNA stabilizing elements. Such sequences would be known or may readily be obtained by a person skilled in the art.

[0072] The genetic constructs of the invention may further include an origin of replication sequence that is required for maintenance and/or replication in a specific cell type. One example is when a genetic construct is required to be maintained in a bacterial cell as an episomal genetic element (e.g. plasmid or cosmid molecule). Preferred origins of replication include, but are not limited to, the f1-ori and colE1.

[0073] For the detection of the successful transfer of the nucleic acid sequences as used in the methods of the invention and/or selection of transgenic plants comprising these nucleic acids, it is advantageous to use marker genes (or reporter genes). Therefore, the genetic construct may optionally comprise a selectable marker gene. Selectable markers are described in more detail in the “definitions” section herein. The marker genes may be removed or excised from the transgenic cell once they are no longer needed. Techniques for marker removal are known in the art, useful techniques are described above in the definitions section.

### Regulatory Element/Control Sequence/Promoter

[0074] The terms “regulatory element”, “control sequence” and “promoter” are all used interchangeably herein and are to be taken in a broad context to refer to regulatory nucleic acid sequences capable of effecting expression of the sequences to which they are ligated. The term “promoter” typically refers to a nucleic acid control sequence located upstream from the transcriptional start of a gene and which is involved in recognising and binding of RNA polymerase and other proteins, thereby directing transcription of an operably linked nucleic acid. Encompassed by the aforementioned terms are transcriptional regulatory sequences derived from a classical eukaryotic genomic gene (including the TATA box which is required for accurate transcription initiation, with or without a CCAAT box sequence) and additional regulatory elements (i.e. upstream activating sequences, enhancers and silencers) which alter gene expression in response to developmental and/or external stimuli, or in a tissue-specific manner. Also included within the term is a transcriptional regulatory sequence of a classical prokaryotic gene, in which case it may include a −35 box sequence and/or −10 box transcriptional regulatory sequences. The term “regulatory element” also encompasses a synthetic fusion molecule or derivative that confers, activates or enhances expression of a nucleic acid molecule in a cell, tissue or organ.

[0075] A “plant promoter” comprises regulatory elements, which mediate the expression of a coding sequence segment in plant cells. Accordingly, a plant promoter need not be of plant origin, but may originate from viruses or micro-organisms, for example from viruses which attack plant cells. The “plant promoter” can also originate from a plant cell, e.g. from the plant which is transformed with the nucleic acid sequence to be expressed in the inventive process and described herein. This also applies to other “plant” regulatory signals, such as “plant” terminators. The promoters upstream of the nucleotide sequences useful in the methods of the present invention can be modified by one or more nucleotide substitution(s), insertion(s) and/or deletion(s) without interfering with the functionality or activity of either the promoters, the open reading frame (ORF) or the 3′-regulatory region such as terminators or other 3′ regulatory regions which are located away from the ORF. It is furthermore possible that the activity of the promoters is increased by modification of their sequence, or that they are replaced completely by more active promoters, even promoters from heterologous organisms. For expression in plants, the nucleic acid molecule must, as described above, be linked operably to or comprise a suitable promoter which expresses the gene at the right point in time and with the required spatial expression pattern.

[0076] For the identification of functionally equivalent promoters, the promoter strength and/or expression pattern of a candidate promoter may be analysed for example by operably linking the promoter to a reporter gene and assaying the expression level and pattern of the reporter gene in various tissues of the plant. Suitable well-known reporter genes include for example beta-glucuronidase or beta-galactosidase. The promoter activity is assayed by measuring the enzymatic activity of the beta-glucuronidase or beta-galactosidase. The promoter strength and/or expression pattern may then be compared to that of a reference promoter (such as the one used in the methods of the present invention). Alternatively, promoter strength may be assayed by quantifying mRNA levels or by comparing mRNA levels of the nucleic acid used in the methods of the present invention, with mRNA levels of housekeeping genes such as 18S rRNA, using methods known in the art, such as Northern blotting with densitometric analysis of autoradiograms, quantitative real-time PCR or RT-PCR (Heid et al., 1996 Genome Methods 6: 986-994). Generally by “weak promoter” is intended a promoter that drives expression of a coding sequence at a low level. By “low level” is intended at levels of about 1/10,000 transcripts to about 1/100,000 transcripts, to about 1/500,0000 transcripts per cell. Conversely, a “strong promoter” drives expression of a coding sequence at high level, or at about 1/10 transcripts to about 1/100 transcripts to about 1/1000 transcripts per cell. Generally, by “medium strength promoter” is intended a promoter that drives expression of a coding sequence at a lower level than a strong promoter, in particular at a level that is in all instances below that obtained when under the control of a 35S CaMV promoter.

### Operably Linked

[0077] The term “operably linked” as used herein refers to a functional linkage between the promoter sequence and the gene of interest, such that the promoter sequence is able to initiate transcription of the gene of interest.

### Constitutive Promoter

[0078] A “constitutive promoter” refers to a promoter that is transcriptionally active during most, but not necessarily all, phases of growth and development and under most environmental conditions, in at least one cell, tissue or organ. Table 2a below gives examples of constitutive promoters.

TABLE 2A
Examples of constitutive promoters

| Gene Source | Reference |
|---|---|
| Actin | McElroy et al, Plant Cell, 2: 163-171, 1990 |
| HMGP | WO 2004/070039 |
| CAMV 35S | Odell et al, Nature, 313: 810-812, 1985 |
| CaMV 19S | Nilsson et al., Physiol. Plant. 100: 456-462, 1997 |
| GOS2 | de Pater et al, Plant J Nov; 2(6): 837-44, 1992, |
| | WO 2004/065596 |
| Ubiquitin | Christensen et al, Plant Mol. Biol. 18: 675-689, |
| | 1992 |
| Rice cyclophilin | Buchholz et al, Plant Mol Biol. 25(5): 837-43, 1994 |
| Maize H3 histone | Lepetit et al, Mol. Gen. Genet. 231: 276-285, 1992 |
| Alfalfa H3 histone | Wu et al. Plant Mol. Biol. 11: 641-649, 1988 |
| Actin 2 | An et al, Plant J. 10(1); 107-121, 1996 |
| 34S FMV | Sanger et al., Plant. Mol. Biol., 14, 1990: 433-443 |
| Rubisco small subunit | U.S. Pat. No. 4,962,028 |
| OCS | Leisner (1988) Proc Natl Acad Sci USA 85(5): |
| | 2553 |
| SAD1 | Jain et al., Crop Science, 39(6), 1999: 1696 |
| SAD2 | Jain et al., Crop Science, 39(6), 1999: 1696 |
| nos | Shaw et al. (1984) Nucleic Acids Res. 12(20): |
| | 7831-7846 |
| V-ATPase | WO 01/14572 |
| Super promoter | WO 95/14098 |
| G-box proteins | WO 94/12015 |

### Ubiquitous Promoter

[0079] A ubiquitous promoter is active in substantially all tissues or cells of an organism.

### Developmentally-Regulated Promoter

[0080] A developmentally-regulated promoter is active during certain developmental stages or in parts of the plant that undergo developmental changes.

### Inducible Promoter

[0081] An inducible promoter has induced or increased transcription initiation in response to a chemical (for a review see Gatz 1997, Annu. Rev. Plant Physiol. Plant Mol. Biol., 48:89-108), environmental or physical stimulus, or may be “stress-inducible”, i.e. activated when a plant is exposed to various stress conditions, or a “pathogen-inducible” i.e. activated when a plant is exposed to exposure to various pathogens.

### Organ-Specific/Tissue-Specific Promoter

[0082] An organ-specific or tissue-specific promoter is one that is capable of preferentially initiating transcription in certain organs or tissues, such as the leaves, roots, seed tissue etc. For example, a “root-specific promoter” is a promoter that is transcriptionally active predominantly in plant roots, substantially to the exclusion of any other parts of a plant, whilst still allowing for any leaky expression in these other plant parts. Promoters able to initiate transcription in certain cells only are referred to herein as “cell-specific”.

[0083] Examples of root-specific promoters are listed in Table 2b below:

TABLE 2B
Examples of root-specific promoters

| Gene Source | Reference |
|---|---|
| RCc3 | Plant Mol Biol. 1995 Jan; 27(2): 237-48 |
| Arabidopsis PHT1 | Kovama et al., 2005; Mudge et al. (2002, |
| | Plant J. 31: 341) |
| Medicago phosphate | Xiao et al., 2006 |
| transporter | |
| Arabidopsis Pyk10 | Nitz et al. (2001) Plant Sci 161(2): 337-346 |
| root-expressible genes | Tingey et al., EMBO J. 6: 1, 1987. |
| tobacco auxin- | Van der Zaal et al., Plant Mol. Biol. 16, 983, |
| inducible gene | 1991. |
| β-tubulin | Oppenheimer, et al., Gene 63: 87, 1988. |
| tobacco root-specific | Conkling, et al., Plant Physiol. 93: 1203, 1990. |
| genes | |
| B. napus G1-3b gene | U.S. Pat. No. 5,401,836 |
| SbPRP1 | Suzuki et al., Plant Mol. Biol. 21: 109-119, 1993. |
| LRX1 | Baumberger et al. 2001, Genes & Dev. 15: 1128 |
| BTG-26 Brassica napus | US 20050044585 |
| LeAMT1 (tomato) | Lauter et al. (1996, PNAS 3: 8139) |
| The LeNRT1-1 | Lauter et al. (1996, PNAS 3: 8139) |
| (tomato) | |
| class I patatin gene | Liu et al., Plant Mol. Biol. 153: 386-395, 1991. |
| (potato) | |
| KDC1 (Daucus carota) | Downey et al. (2000, J. Biol. Chem. 275: 39420) |
| TobRB7 gene | W Song (1997) PhD Thesis, North Carolina |
| | State University, Raleigh, NC USA |
| OsRAB5a (rice) | Wang et al. 2002, Plant Sci. 163: 273 |
| ALF5 (Arabidopsis) | Diener et al. (2001, Plant Cell 13: 1625) |
| NRT2; 1Np (N. | Quesada et al. (1997, Plant Mol. Biol. 34: 265) |
| plumbaginifolia) | |

[0084] A seed-specific promoter is transcriptionally active predominantly in seed tissue, but not necessarily exclusively in seed tissue (in cases of leaky expression). The seed-specific promoter may be active during seed development and/or during germination. The seed specific promoter may be endosperm/aleurone/embryo specific. Examples of seed-specific promoters (endosperm/aleurone/embryo specific) are shown in Table 2c to Table 2f below. Further examples of seed-specific promoters are given in Qing Qu and Takaiwa (Plant Biotechnol. J. 2, 113-125, 2004), which disclosure is incorporated by reference herein as if fully set forth.

TABLE 2C
Examples of seed-specific promoters

| Gene source | Reference |
|---|---|
| seed-specific genes | Simon et al., Plant Mol. Biol. 5: 191, 1985; |
| | Scofield et al., J. Biol. Chem. 262: 12202, 1987.; |
| | Baszczynski et al., Plant Mol. Biol. 14: 633, 1990. |
| Brazil Nut albumin | Pearson et al., Plant Mol. Biol. 18: 235-245, 1992. |
| legumin | Ellis et al., Plant Mol. Biol. 10: 203-214, 1988. |
| glutelin (rice) | Takaiwa et al., Mol. Gen. Genet. 208: 15-22, 1986; |
| | Takaiwa et al., FEBS Letts. 221: 43-47, 1987. |
| zein | Matzke et at Plant Mol Biol, 14(3): 323-32 1990 |
| napA | Stalberg et al, Planta 199: 515-519, 1996. |
| wheat LMW and | Mol Gen Genet 216: 81-90, 1989; NAR 17: 461- |
| HMW glutenin-1 | 2, 1989 |
| wheat SPA | Albani et al, Plant Cell, 9: 171-184, 1997 |
| wheat α, β, γ-gliadins | EMBO J. 3: 1409-15, 1984 |
| barley Itr1 promoter | Diaz et al. (1995) Mol Gen Genet 248(5): 592-8 |
| barley B1, C, D, | Theor Appl Gen 98: 1253-62, 1999; Plant J 4: 343- |
| hordein | 55, 1993; Mol Gen Genet 250: 750-60, 1996 |
| barley DOF | Mena et al, The Plant Journal, 116(1): 53-62, 1998 |
| blz2 | EP99106056.7 |
| synthetic promoter | Vicente-Carbajosa et al., Plant J. 13: 629-640, 1998. |
| rice prolamin NRP33 | Wu et al, Plant Cell Physiology 39(8) 885-889, 1998 |
| rice a-globulin Glb-1 | Wu et al, Plant Cell Physiology 39(8) 885-889, 1998 |
| rice OSH1 | Sato et al, Proc. Natl. Acad. Sci. USA, 93: 8117- |
| | 8122, 1996 |
| rice α-globulin | Nakase et al. Plant Mol. Biol. 33: 513-522, 1997 |
| REB/OHP-1 | |
| rice ADP-glucose | Trans Res 6: 157-68, 1997 |
| pyrophos-phorylase | |
| maize ESR gene | Plant J 12: 235-46, 1997 |
| family | |
| sorghum α-kafirin | DeRose et al., Plant Mol. Biol 32: 1029-35, 1996 |
| KNOX | Postma-Haarsma et al, Plant Mol. Biol. 39: 257- |
| | 71, 1999 |
| rice oleosin | Wu et al, J. Biochem. 123: 386, 1998 |
| sunflower oleosin | Cummins et al., Plant Mol. Biol. 19: 873-876, 1992 |
| PRO0117, | WO 2004/070039 |
| putative rice 40S | |
| ribosomal protein | |
| PRO0136, | unpublished |
| rice alanine | |
| aminotransferase | |
| PRO0147, | unpublished |
| trypsin inhibitor | |
| ITR1 (barley) | |
| PRO0151, | WO 2004/070039 |
| rice WSI18 | |
| PRO0175, | WO 2004/070039 |
| rice RAB21 | |
| PRO005 | WO 2004/070039 |
| PRO0095 | WO 2004/070039 |
| α-amylase (Amy32b) | Lanahan et al, Plant Cell 4: 203-211, 1992; Skriver |
| | et al, Proc Natl Acad Sci USA 88: 7266-7270, 1991 |
| cathepsin β-like gene | Cejudo et al, Plant Mol Biol 20: 849-856, 1992 |
| Barley Ltp2 | Kalla et al., Plant J. 6: 849-60, 1994 |
| Chi26 | Leah et al., Plant J. 4: 579-89, 1994 |
| Maize B-Peru | Selinger et al., Genetics 149; 1125-38, 1998 |

TABLE 2d
examples of endosperm-specific promoters

| Gene source | Reference |
|---|---|
| glutelin (rice) | Takaiwa et al. (1986) Mol Gen Genet 208: 15-22; |
| | Takaiwa et al. (1987) FEBS Letts. 221: 43-47 |
| zein | Matzke et al., (1990) Plant Mol Biol 14(3): 323-32 |
| wheat LMW and | Colot et al. (1989) Mol Gen Genet 216: 81-90, |
| HMW glutenin-1 | Anderson et al. (1989) NAR 17: 461-2 |
| wheat SPA | Albani et al. (1997) Plant Cell 9: 171-184 |
| wheat gliadins | Rafalski et al. (1984) EMBO 3: 1409-15 |
| barley ltr1 promoter | Diaz et al. (1995) Mol Gen Genet 248(5): 592-8 |
| barley B1, C, D, | Cho et al. (1999) Theor Appl Genet 98: 1253-62; |
| hordein | Muller et al. (1993) Plant J 4: 343-55; |
| | Sorenson et al. (1996) Mol Gen Genet 250: 750-60 |
| barley DOF | Mena et al, (1998) Plant J 116(1): 53-62 |
| blz2 | Onate et al. (1999) J Biol Chem 274(14): 9175-82 |
| synthetic promoter | Vicente-Carbajosa et al. (1998) Plant J 13: 629-640 |
| rice prolamin | Wu et al, (1998) Plant Cell Physiol 39(8) 885-889 |
| NRP33 | |
| rice globulin Glb-1 | Wu et al. (1998) Plant Cell Physiol 39(8) 885-889 |
| rice globulin | Nakase et al. (1997) Plant Molec Biol 33: 513-522 |
| REB/OHP-1 | |
| rice ADP-glucose | Russell et al. (1997) Trans Res 6: 157-68 |
| pyrophosphorylase | |
| maize ESR gene | Opsahl-Ferstad et al. (1997) Plant J 12: 235-46 |
| family | |
| sorghum kafirin | DeRose et al. (1996) Plant Mol Biol 32: 1029-35 |

TABLE 2e
Examples of embryo specific promoters:

| Gene source | Reference |
|---|---|
| rice OSH1 | Sato et al, Proc. Natl. Acad. Sci. USA, 93: 8117-8122, |
| | 1996 |
| KNOX | Postma-Haarsma et al, Plant Mol. Biol. 39: 257-71, 1999 |
| PRO0151 | WO 2004/070039 |
| PRO0175 | WO 2004/070039 |
| PRO005 | WO 2004/070039 |
| PRO0095 | WO 2004/070039 |

TABLE 2f
Examples of aleurone-specific promoters:

| Gene source | Reference |
|---|---|
| α-amylase (Amy32b) | Lanahan et al, Plant Cell 4: 203-211, 1992; |
| | Skriver et al, Proc Natl Acad Sci USA 88: |
| | 7266-7270, 1991 |
| cathepsin β-like gene | Cejudo et al, Plant Mol Biol 20: 849-856, 1992 |
| Barley Ltp2 | Kalla et al., Plant J. 6: 849-60, 1994 |
| Chi26 | Leah et al., Plant J. 4: 579-89, 1994 |
| Maize B-Peru | Selinger et al., Genetics 149; 1125-38, 1998 |

[0085] A green tissue-specific promoter as defined herein is a promoter that is transcriptionally active predominantly in green tissue, substantially to the exclusion of any other parts of a plant, whilst still allowing for any leaky expression in these other plant parts.

[0086] Examples of green tissue-specific promoters which may be used to perform the methods of the invention are shown in Table 2g below.

TABLE 2g
Examples of green tissue-specific promoters

| Gene | Expression | Reference |
|---|---|---|
| Maize Orthophosphate dikinase | Leaf specific | Fukavama et al., 2001 |
| Maize Phosphoenolpyruvate | Leaf specific | Kausch et al., 2001 |
| carboxylase | | |
| Rice Phosphoenolpyruvate | Leaf specific | Liu et al., 2003 |
| carboxylase | | |
| Rice small subunit Rubisco | Leaf specific | Nomura et al., 2000 |
| rice beta expansin EXBP9 | Shoot specific | WO 2004/070039 |
| Pigeonpea small subunit Rubisco | Leaf specific | Panguluri et al., 2005 |
| Pea RBCS3A | Leaf specific | |

[0087] Another example of a tissue-specific promoter is a meristem-specific promoter, which is transcriptionally active predominantly in meristematic tissue, substantially to the exclusion of any other parts of a plant, whilst still allowing for any leaky expression in these other plant parts. Examples of green meristem-specific promoters which may be used to perform the methods of the invention are shown in Table 2h below.

TABLE 2h
Examples of meristem-specific promoters

| Gene source | Expression pattern | Reference |
|---|---|---|
| rice OSH1 | Shoot apical meristem, | Sato et al. (1996) Proc. |
| | from embryo globular | Natl. Acad. Sci. USA, 93: |
| | stage to seedling stage | 8117-8122 |
| Rice metallothionein | Meristem specific | BAD87835.1 |
| WAK1 & WAK 2 | Shoot and root apical | Wagner & Kohorn (2001) |
| | meristems, and in | Plant Cell 13(2): 303-318 |
| | expanding leaves and | |
| | sepals | |

### Terminator

[0088] The term “terminator” encompasses a control sequence which is a DNA sequence at the end of a transcriptional unit which signals 3′ processing and polyadenylation of a primary transcript and termination of transcription. The terminator can be derived from the natural gene, from a variety of other plant genes, or from T-DNA. The terminator to be added may be derived from, for example, the nopaline synthase or octopine synthase genes, or alternatively from another plant gene, or less preferably from any other eukaryotic gene.

### Selectable Marker (Gene)/Reporter Gene

[0089] “Selectable marker”, “selectable marker gene” or “reporter gene” includes any gene that confers a phenotype on a cell in which it is expressed to facilitate the identification and/or selection of cells that are transfected or transformed with a nucleic acid construct of the invention. These marker genes enable the identification of a successful transfer of the nucleic acid molecules via a series of different principles. Suitable markers may be selected from markers that confer antibiotic or herbicide resistance, that introduce a new metabolic trait or that allow visual selection. Examples of selectable marker genes include genes conferring resistance to antibiotics (such as nptlI that phosphorylates neomycin and kanamycin, or hpt, phosphorylating hygromycin, or genes conferring resistance to, for example, bleomycin, streptomycin, tetracyclin, chloramphenicol, ampicillin, gentamycin, geneticin (G418), spectinomycin or blasticidin), to herbicides (for example bar which provides resistance to Basta®; aroA or gox providing resistance against glyphosate, or the genes conferring resistance to, for example, imidazolinone, phosphinothricin or sulfonylurea), or genes that provide a metabolic trait (such as manA that allows plants to use mannose as sole carbon source or xylose isomerase for the utilisation of xylose, or antinutritive markers such as the resistance to 2-deoxyglucose). Expression of visual marker genes results in the formation of colour (for example β-glucuronidase, GUS or β-galactosidase with its coloured substrates, for example X-Gal), luminescence (such as the luciferin/luciferase system) or fluorescence (Green Fluorescent Protein, GFP, and derivatives thereof). This list represents only a small number of possible markers. The skilled worker is familiar with such markers. Different markers are preferred, depending on the organism and the selection method.

[0090] It is known that upon stable or transient integration of nucleic acids into plant cells, only a minority of the cells takes up the foreign DNA and, if desired, integrates it into its genome, depending on the expression vector used and the transfection technique used. To identify and select these integrants, a gene coding for a selectable marker (such as the ones described above) is usually introduced into the host cells together with the gene of interest. These markers can for example be used in mutants in which these genes are not functional by, for example, deletion by conventional methods. Furthermore, nucleic acid molecules encoding a selectable marker can be introduced into a host cell on the same vector that comprises the sequence encoding the polypeptides of the invention or used in the methods of the invention, or else in a separate vector. Cells which have been stably transfected with the introduced nucleic acid can be identified for example by selection (for example, cells which have integrated the selectable marker survive whereas the other cells die).

[0091] Since the marker genes, particularly genes for resistance to antibiotics and herbicides, are no longer required or are undesired in the transgenic host cell once the nucleic acids have been introduced successfully, the process according to the invention for introducing the nucleic acids advantageously employs techniques which enable the removal or excision of these marker genes. One such a method is what is known as co-transformation. The co-transformation method employs two vectors simultaneously for the transformation, one vector bearing the nucleic acid according to the invention and a second bearing the marker gene(s). A large proportion of transformants receives or, in the case of plants, comprises (up to 40% or more of the transformants), both vectors. In case of transformation with Agrobacteria, the transformants usually receive only a part of the vector, i.e. the sequence flanked by the T-DNA, which usually represents the expression cassette. The marker genes can subsequently be removed from the transformed plant by performing crosses. In another method, marker genes integrated into a transposon are used for the transformation together with desired nucleic acid (known as the Ac/Ds technology). The transformants can be crossed with a transposase source or the transformants are transformed with a nucleic acid construct conferring expression of a transposase, transiently or stable. In some cases (approx. 10%), the transposon jumps out of the genome of the host cell once transformation has taken place successfully and is lost. In a further number of cases, the transposon jumps to a different location. In these cases the marker gene must be eliminated by performing crosses. In microbiology, techniques were developed which make possible, or facilitate, the detection of such events. A further advantageous method relies on what is known as recombination systems; whose advantage is that elimination by crossing can be dispensed with. The best-known system of this type is what is known as the Cre/lox system. Cre1 is a recombinase that removes the sequences located between the loxP sequences. If the marker gene is integrated between the loxP sequences, it is removed once transformation has taken place successfully, by expression of the recombinase. Further recombination systems are the HIN/HIX, FLP/FRT and REP/STB system (Tribble et al., J. Biol. Chem., 275, 2000: 22255-22267; Velmurugan et al., J. Cell Biol., 149, 2000: 553-566). A site-specific integration into the plant genome of the nucleic acid sequences according to the invention is possible. Naturally, these methods can also be applied to microorganisms such as yeast, fungi or bacteria.

### Transgenic/Transgene/Recombinant

[0092] For the purposes of the invention, “transgenic”, “transgene” or “recombinant” means with regard to, for example, a nucleic acid sequence, an expression cassette, gene construct or a vector comprising the nucleic acid sequence or an organism transformed with the nucleic acid sequences, expression cassettes or vectors according to the invention, all those constructions brought about by recombinant methods in which either
[0093] (a) the nucleic acid sequences encoding proteins useful in the methods of the invention, or
[0094] (b) genetic control sequence(s) which is operably linked with the nucleic acid sequence according to the invention, for example a promoter, or
[0095] (c) a) and b)
   are not located in their natural genetic environment or have been modified by recombinant methods, it being possible for the modification to take the form of, for example, a substitution, addition, deletion, inversion or insertion of one or more nucleotide residues. The natural genetic environment is understood as meaning the natural genomic or chromosomal locus in the original plant or the presence in a genomic library. In the case of a genomic library, the natural genetic environment of the nucleic acid sequence is preferably retained, at least in part. The environment flanks the nucleic acid sequence at least on one side and has a sequence length of at least 50 bp, preferably at least 500 bp, especially preferably at least 1000 bp, most preferably at least 5000 bp. A naturally occurring expression cassette—for example the naturally occurring combination of the natural promoter of the nucleic acid sequences with the corresponding nucleic acid sequence encoding a polypeptide useful in the methods of the present invention, as defined above—becomes a transgenic expression cassette when this expression cassette is modified by non-natural, synthetic (“artificial”) methods such as, for example, mutagenic treatment. Suitable methods are described, for example, in U.S. Pat. No. 5,565,350 or WO 00/15815.

[0096] A transgenic plant for the purposes of the invention is thus understood as meaning, as above, that the nucleic acids used in the method of the invention are not at their natural locus in the genome of said plant, it being possible for the nucleic acids to be expressed homologously or heterologously. However, as mentioned, transgenic also means that, while the nucleic acids according to the invention or used in the inventive method are at their natural position in the genome of a plant, the sequence has been modified with regard to the natural sequence, and/or that the regulatory sequences of the natural sequences have been modified. Transgenic is preferably understood as meaning the expression of the nucleic acids according to the invention at an unnatural locus in the genome, i.e. homologous or, preferably, heterologous expression of the nucleic acids takes place. Preferred transgenic plants are mentioned herein.

### Modulation

[0097] The term “modulation” means in relation to expression or gene expression, a process in which the expression level is changed by said gene expression in comparison to the control plant, the expression level may be increased or decreased. The original, unmodulated expression may be of any kind of expression of a structural RNA (rRNA, tRNA) or mRNA with subsequent translation. The term “modulating the activity” shall mean any change of the expression of the inventive nucleic acid sequences or encoded proteins, which leads to increased yield and/or increased growth of the plants.

### Expression

[0098] The term “expression” or “gene expression” means the transcription of a specific gene or specific genes or specific genetic construct. The term “expression” or “gene expression” in particular means the transcription of a gene or genes or genetic construct into structural RNA (rRNA, tRNA) or mRNA with or without subsequent translation of the latter into a protein. The process includes transcription of DNA and processing of the resulting mRNA product.

### Increased Expression/Overexpression

[0099] The term “increased expression” or “overexpression” as used herein means any form of expression that is additional to the original wild-type expression level.

[0100] Methods for increasing expression of genes or gene products are well documented in the art and include, for example, overexpression driven by appropriate promoters, the use of transcription enhancers or translation enhancers. Isolated nucleic acids which serve as promoter or enhancer elements may be introduced in an appropriate position (typically upstream) of a non-heterologous form of a polynucleotide so as to upregulate expression of a nucleic acid encoding the polypeptide of interest. For example, endogenous promoters may be altered in vivo by mutation, deletion, and/or substitution (see, Kmiec, U.S. Pat. No. 5,565,350; Zarling et al., WO9322443), or isolated promoters may be introduced into a plant cell in the proper orientation and distance from a gene of the present invention so as to control the expression of the gene.

[0101] If polypeptide expression is desired, it is generally desirable to include a polyadenylation region at the 3′-end of a polynucleotide coding region. The polyadenylation region can be derived from the natural gene, from a variety of other plant genes, or from T-DNA. The 3′ end sequence to be added may be derived from, for example, the nopaline synthase or octopine synthase genes, or alternatively from another plant gene, or less preferably from any other eukaryotic gene.

[0102] An intron sequence may also be added to the 5′ untranslated region (UTR) or the coding sequence of the partial coding sequence to increase the amount of the mature message that accumulates in the cytosol. Inclusion of a spliceable intron in the transcription unit in both plant and animal expression constructs has been shown to increase gene expression at both the mRNA and protein levels up to 1000-fold (Buchman and Berg (1988) Mol. Cell biol. 8: 4395-4405; Callis et al. (1987) Genes Dev 1:1183-1200). Such intron enhancement of gene expression is typically greatest when placed near the 5′ end of the transcription unit. Use of the maize introns Adh1-S intron 1, 2, and 6, the Bronze-1 intron are known in the art. For general information see: The Maize Handbook, Chapter 116, Freeling and Walbot, Eds., Springer, N.Y. (1994).

### Decreased Expression

[0103] Reference herein to “decreased expression” or “reduction or substantial elimination” of expression is taken to mean a decrease in endogenous gene expression and/or polypeptide levels and/or polypeptide activity relative to control plants. The reduction or substantial elimination is in increasing order of preference at least 10%, 20%, 30%, 40% or 50%, 60%, 70%, 80%, 85%, 90%, or 95%, 96%, 97%, 98%, 99% or more reduced compared to that of control plants.

[0104] For the reduction or substantial elimination of expression an endogenous gene in a plant, a sufficient length of substantially contiguous nucleotides of a nucleic acid sequence is required. In order to perform gene silencing, this may be as little as 20, 19, 18, 17, 16, 15, 14, 13, 12, 11, 10 or fewer nucleotides, alternatively this may be as much as the entire gene (including the 5′ and/or 3′ UTR, either in part or in whole). The stretch of substantially contiguous nucleotides may be derived from the nucleic acid encoding the protein of interest (target gene), or from any nucleic acid capable of encoding an orthologue, paralogue or homologue of the protein of interest. Preferably, the stretch of substantially contiguous nucleotides is capable of forming hydrogen bonds with the target gene (either sense or antisense strand), more preferably, the stretch of substantially contiguous nucleotides has, in increasing order of preference, 50%, 60%, 70%, 80%, 85%, 90%, 95%, 96%, 97%, 98%, 99%, 100% sequence identity to the target gene (either sense or antisense strand). A nucleic acid sequence encoding a (functional) polypeptide is not a requirement for the various methods discussed herein for the reduction or substantial elimination of expression of an endogenous gene.

[0105] This reduction or substantial elimination of expression may be achieved using routine tools and techniques. A preferred method for the reduction or substantial elimination of endogenous gene expression is by introducing and expressing in a plant a genetic construct into which the nucleic acid (in this case a stretch of substantially contiguous nucleotides derived from the gene of interest, or from any nucleic acid capable of encoding an orthologue, paralogue or homologue of any one of the protein of interest) is cloned as an inverted repeat (in part or completely), separated by a spacer (non-coding DNA).

[0106] In such a preferred method, expression of the endogenous gene is reduced or substantially eliminated through RNA-mediated silencing using an inverted repeat of a nucleic acid or a part thereof (in this case a stretch of substantially contiguous nucleotides derived from the gene of interest, or from any nucleic acid capable of encoding an orthologue, paralogue or homologue of the protein of interest), preferably capable of forming a hairpin structure. The inverted repeat is cloned in an expression vector comprising control sequences. A non-coding DNA nucleic acid sequence (a spacer, for example a matrix attachment region fragment (MAR), an intron, a polylinker, etc.) is located between the two inverted nucleic acids forming the inverted repeat. After transcription of the inverted repeat, a chimeric RNA with a self-complementary structure is formed (partial or complete). This double-stranded RNA structure is referred to as the hairpin RNA (hpRNA). The hpRNA is processed by the plant into siRNAs that are incorporated into an RNA-induced silencing complex (RISC). The RISC further cleaves the mRNA transcripts, thereby substantially reducing the number of mRNA transcripts to be translated into polypeptides. For further general details see for example, Grierson et al. (1998) WO 98/53083; Waterhouse et al. (1999) WO 99/53050).

[0107] Performance of the methods of the invention does not rely on introducing and expressing in a plant a genetic construct into which the nucleic acid is cloned as an inverted repeat, but any one or more of several well-known “gene silencing” methods may be used to achieve the same effects.

[0108] One such method for the reduction of endogenous gene expression is RNA-mediated silencing of gene expression (downregulation). Silencing in this case is triggered in a plant by a double stranded RNA sequence (dsRNA) that is substantially similar to the target endogenous gene. This dsRNA is further processed by the plant into about 20 to about 26 nucleotides called short interfering RNAs (siRNAs). The siRNAs are incorporated into an RNA-induced silencing complex (RISC) that cleaves the mRNA transcript of the endogenous target gene, thereby substantially reducing the number of mRNA transcripts to be translated into a polypeptide. Preferably, the double stranded RNA sequence corresponds to a target gene.

[0109] Another example of an RNA silencing method involves the introduction of nucleic acid sequences or parts thereof (in this case a stretch of substantially contiguous nucleotides derived from the gene of interest, or from any nucleic acid capable of encoding an orthologue, paralogue or homologue of the protein of interest) in a sense orientation into a plant. “Sense orientation” refers to a DNA sequence that is homologous to an mRNA transcript thereof. Introduced into a plant would therefore be at least one copy of the nucleic acid sequence. The additional nucleic acid sequence will reduce expression of the endogenous gene, giving rise to a phenomenon known as co-suppression. The reduction of gene expression will be more pronounced if several additional copies of a nucleic acid sequence are introduced into the plant, as there is a positive correlation between high transcript levels and the triggering of co-suppression.

[0110] Another example of an RNA silencing method involves the use of antisense nucleic acid sequences. An “antisense” nucleic acid sequence comprises a nucleotide sequence that is complementary to a “sense” nucleic acid sequence encoding a protein, i.e. complementary to the coding strand of a double-stranded cDNA molecule or complementary to an mRNA transcript sequence. The antisense nucleic acid sequence is preferably complementary to the endogenous gene to be silenced. The complementarity may be located in the “coding region” and/or in the “non-coding region” of a gene. The term “coding region” refers to a region of the nucleotide sequence comprising codons that are translated into amino acid residues. The term “non-coding region” refers to 5′ and 3′ sequences that flank the coding region that are transcribed but not translated into amino acids (also referred to as 5′ and 3′ untranslated regions).

[0111] Antisense nucleic acid sequences can be designed according to the rules of Watson and Crick base pairing. The antisense nucleic acid sequence may be complementary to the entire nucleic acid sequence (in this case a stretch of substantially contiguous nucleotides derived from the gene of interest, or from any nucleic acid capable of encoding an orthologue, paralogue or homologue of the protein of interest), but may also be an oligonucleotide that is antisense to only a part of the nucleic acid sequence (including the mRNA 5′ and 3′ UTR). For example, the antisense oligonucleotide sequence may be complementary to the region surrounding the translation start site of an mRNA transcript encoding a polypeptide. The length of a suitable antisense oligonucleotide sequence is known in the art and may start from about 50, 45, 40, 35, 30, 25, 20, 15 or 10 nucleotides in length or less. An antisense nucleic acid sequence according to the invention may be constructed using chemical synthesis and enzymatic ligation reactions using methods known in the art. For example, an antisense nucleic acid sequence (e.g., an antisense oligonucleotide sequence) may be chemically synthesized using naturally occurring nucleotides or variously modified nucleotides designed to increase the biological stability of the molecules or to increase the physical stability of the duplex formed between the antisense and sense nucleic acid sequences, e.g., phosphorothioate derivatives and acridine substituted nucleotides may be used. Examples of modified nucleotides that may be used to generate the antisense nucleic acid sequences are well known in the art. Known nucleotide modifications include methylation, cyclization and ‘caps’ and substitution of one or more of the naturally occurring nucleotides with an analogue such as inosine. Other modifications of nucleotides are well known in the art.

[0112] The antisense nucleic acid sequence can be produced biologically using an expression vector into which a nucleic acid sequence has been subcloned in an antisense orientation (i.e., RNA transcribed from the inserted nucleic acid will be of an antisense orientation to a target nucleic acid of interest). Preferably, production of antisense nucleic acid sequences in plants occurs by means of a stably integrated nucleic acid construct comprising a promoter, an operably linked antisense oligonucleotide, and a terminator.

[0113] The nucleic acid molecules used for silencing in the methods of the invention (whether introduced into a plant or generated in situ) hybridize with or bind to mRNA transcripts and/or genomic DNA encoding a polypeptide to thereby inhibit expression of the protein, e.g., by inhibiting transcription and/or translation. The hybridization can be by conventional nucleotide complementarity to form a stable duplex, or, for example, in the case of an antisense nucleic acid sequence which binds to DNA duplexes, through specific interactions in the major groove of the double helix. Antisense nucleic acid sequences may be introduced into a plant by transformation or direct injection at a specific tissue site. Alternatively, antisense nucleic acid sequences can be modified to target selected cells and then administered systemically. For example, for systemic administration, antisense nucleic acid sequences can be modified such that they specifically bind to receptors or antigens expressed on a selected cell surface, e.g., by linking the antisense nucleic acid sequence to peptides or antibodies which bind to cell surface receptors or antigens. The antisense nucleic acid sequences can also be delivered to cells using the vectors described herein.

[0114] According to a further aspect, the antisense nucleic acid sequence is an a-anomeric nucleic acid sequence. An a-anomeric nucleic acid sequence forms specific double-stranded hybrids with complementary RNA in which, contrary to the usual b-units, the strands run parallel to each other (Gaultier et al. (1987) Nucl Ac Res 15: 6625-6641). The antisense nucleic acid sequence may also comprise a 2′-o-methylribonucleotide (Inoue et al. (1987) Nucl Ac Res 15, 6131-6148) or a chimeric RNA-DNA analogue (Inoue et al. (1987) FEBS Lett. 215, 327-330).

[0115] The reduction or substantial elimination of endogenous gene expression may also be performed using ribozymes. Ribozymes are catalytic RNA molecules with ribonuclease activity that are capable of cleaving a single-stranded nucleic acid sequence, such as an mRNA, to which they have a complementary region. Thus, ribozymes (e.g., hammerhead ribozymes (described in Haselhoff and Gerlach (1988) Nature 334, 585-591) can be used to catalytically cleave mRNA transcripts encoding a polypeptide, thereby substantially reducing the number of mRNA transcripts to be translated into a polypeptide. A ribozyme having specificity for a nucleic acid sequence can be designed (see for example: Cech et al. U.S. Pat. No. 4,987,071; and Cech et al. U.S. Pat. No. 5,116,742). Alternatively, mRNA transcripts corresponding to a nucleic acid sequence can be used to select a catalytic RNA having a specific ribonuclease activity from a pool of RNA molecules (Bartel and Szostak (1993) Science 261, 1411-1418). The use of ribozymes for gene silencing in plants is known in the art (e.g., Atkins et al. (1994) WO 94/00012; Lenne et al. (1995) WO 95/03404; Lutziger et al. (2000) WO 00/00619; Prinsen et al. (1997) WO 97/13865 and Scott et al. (1997) WO 97/38116).

[0116] Gene silencing may also be achieved by insertion mutagenesis (for example, T-DNA insertion or transposon insertion) or by strategies as described by, among others, Angell and Baulcombe ((1999) Plant J 20(3): 357-62), (Amplicon VIGS WO 98/36083), or Baulcombe (WO 99/15682).

[0117] Gene silencing may also occur if there is a mutation on an endogenous gene and/or a mutation on an isolated gene/nucleic acid subsequently introduced into a plant. The reduction or substantial elimination may be caused by a non-functional polypeptide. For example, the polypeptide may bind to various interacting proteins; one or more mutation(s) and/or truncation(s) may therefore provide for a polypeptide that is still able to bind interacting proteins (such as receptor proteins) but that cannot exhibit its normal function (such as signalling ligand).

[0118] A further approach to gene silencing is by targeting nucleic acid sequences complementary to the regulatory region of the gene (e.g., the promoter and/or enhancers) to form triple helical structures that prevent transcription of the gene in target cells. See Helene, C., Anticancer Drug Res. 6, 569-84, 1991; Helene et al., Ann. N.Y. Acad. Sci. 660, 27-36 1992; and Maher, L. J. Bioassays 14, 807-15, 1992.

[0119] Other methods, such as the use of antibodies directed to an endogenous polypeptide for inhibiting its function in planta, or interference in the signalling pathway in which a polypeptide is involved, will be well known to the skilled man. In particular, it can be envisaged that manmade molecules may be useful for inhibiting the biological function of a target polypeptide, or for interfering with the signalling pathway in which the target polypeptide is involved.

[0120] Alternatively, a screening program may be set up to identify in a plant population natural variants of a gene, which variants encode polypeptides with reduced activity. Such natural variants may also be used for example, to perform homologous recombination.

[0121] Artificial and/or natural microRNAs (miRNAs) may be used to knock out gene expression and/or mRNA translation. Endogenous miRNAs are single stranded small RNAs of typically 19-24 nucleotides long. They function primarily to regulate gene expression and/or mRNA translation. Most plant microRNAs (miRNAs) have perfect or near-perfect complementarity with their target sequences. However, there are natural targets with up to five mismatches. They are processed from longer non-coding RNAs with characteristic fold-back structures by double-strand specific RNases of the Dicer family. Upon processing, they are incorporated in the RNA-induced silencing complex (RISC) by binding to its main component, an Argonaute protein. MiRNAs serve as the specificity components of RISC, since they base-pair to target nucleic acids, mostly mRNAs, in the cytoplasm. Subsequent regulatory events include target mRNA cleavage and destruction and/or translational inhibition. Effects of miRNA overexpression are thus often reflected in decreased mRNA levels of target genes.

[0122] Artificial microRNAs (amiRNAs), which are typically 21 nucleotides in length, can be genetically engineered specifically to negatively regulate gene expression of single or multiple genes of interest. Determinants of plant microRNA target selection are well known in the art. Empirical parameters for target recognition have been defined and can be used to aid in the design of specific amiRNAs, (Schwab et al., Dev. Cell 8, 517-527, 2005). Convenient tools for design and generation of amiRNAs and their precursors are also available to the public (Schwab et al., Plant Cell 18, 1121-1133, 2006).

[0123] For optimal performance, the gene silencing techniques used for reducing expression in a plant of an endogenous gene requires the use of nucleic acid sequences from monocotyledonous plants for transformation of monocotyledonous plants, and from dicotyledonous plants for transformation of dicotyledonous plants. Preferably, a nucleic acid sequence from any given plant species is introduced into that same species. For example, a nucleic acid sequence from rice is transformed into a rice plant. However, it is not an absolute requirement that the nucleic acid sequence to be introduced originates from the same plant species as the plant in which it will be introduced. It is sufficient that there is substantial homology between the endogenous target gene and the nucleic acid to be introduced.

[0124] Described above are examples of various methods for the reduction or substantial elimination of expression in a plant of an endogenous gene. A person skilled in the art would readily be able to adapt the aforementioned methods for silencing so as to achieve reduction of expression of an endogenous gene in a whole plant or in parts thereof through the use of an appropriate promoter, for example.

### Transformation

[0125] The term “introduction” or “transformation” as referred to herein encompasses the transfer of an exogenous polynucleotide into a host cell, irrespective of the method used for transfer. Plant tissue capable of subsequent clonal propagation, whether by organogenesis or embryogenesis, may be transformed with a genetic construct of the present invention and a whole plant regenerated there from. The particular tissue chosen will vary depending on the clonal propagation systems available for, and best suited to, the particular species being transformed. Exemplary tissue targets include leaf disks, pollen, embryos, cotyledons, hypocotyls, megagametophytes, callus tissue, existing meristematic tissue (e.g., apical meristem, axillary buds, and root meristems), and induced meristem tissue (e.g., cotyledon meristem and hypocotyl meristem). The polynucleotide may be transiently or stably introduced into a host cell and may be maintained non-integrated, for example, as a plasmid. Alternatively, it may be integrated into the host genome. The resulting transformed plant cell may then be used to regenerate a transformed plant in a manner known to persons skilled in the art.

[0126] The transfer of foreign genes into the genome of a plant is called transformation. Transformation of plant species is now a fairly routine technique. Advantageously, any of several transformation methods may be used to introduce the gene of interest into a suitable ancestor cell. The methods described for the transformation and regeneration of plants from plant tissues or plant cells may be utilized for transient or for stable transformation. Transformation methods include the use of liposomes, electroporation, chemicals that increase free DNA uptake, injection of the DNA directly into the plant, particle gun bombardment, transformation using viruses or pollen and microprojection. Methods may be selected from the calcium/polyethylene glycol method for protoplasts (Krens, F. A. et al., (1982) Nature 296, 72-74; Negrutiu I et al. (1987) Plant Mol Biol 8: 363-373); electroporation of protoplasts (Shillito R. D. et al. (1985) Bio/Technol 3, 1099-1102); microinjection into plant material (Crossway A et al., (1986) Mol. Gen Genet 202: 179-185); DNA or RNA-coated particle bombardment (Klein TM et al., (1987) Nature 327: 70) infection with (non-integrative) viruses and the like. Transgenic plants, including transgenic crop plants, are preferably produced via Agrobacterium-mediated transformation. An advantageous transformation method is the transformation in planta. To this end, it is possible, for example, to allow the agrobacteria to act on plant seeds or to inoculate the plant meristem with agrobacteria. It has proved particularly expedient in accordance with the invention to allow a suspension of transformed agrobacteria to act on the intact plant or at least on the flower primordia. The plant is subsequently grown on until the seeds of the treated plant are obtained (Clough and Bent, Plant J. (1998) 16, 735-743). Methods for Agrobacterium-mediated transformation of rice include well known methods for rice transformation, such as those described in any of the following: European patent application EP 1198985 A1, Aldemita and Hodges (Planta 199: 612-617, 1996); Chan et al. (Plant Mol Biol 22 (3): 491-506, 1993), Hiei et al. (Plant J 6 (2): 271-282, 1994), which disclosures are incorporated by reference herein as if fully set forth. In the case of corn transformation, the preferred method is as described in either Ishida et al. (Nat. Biotechnol 14(6): 745-50, 1996) or Frame et al. (Plant Physiol 129(1): 13-22, 2002), which disclosures are incorporated by reference herein as if fully set forth. Said methods are further described by way of example in B. Jenes et al., Techniques for Gene Transfer, in: Transgenic Plants, Vol. 1, Engineering and Utilization, eds. S. D. Kung and R. Wu, Academic Press (1993) 128-143 and in Potrykus Annu. Rev. Plant Physiol. Plant Molec. Biol. 42 (1991) 205-225). The nucleic acids or the construct to be expressed is preferably cloned into a vector, which is suitable for transforming Agrobacterium tumefaciens, for example pBin19 (Bevan et al., Nucl. Acids Res. 12 (1984) 8711). Agrobacteria transformed by such a vector can then be used in known manner for the transformation of plants, such as plants used as a model, like Arabidopsis (Arabidopsis thaliana is within the scope of the present invention not considered as a crop plant), or crop plants such as, by way of example, tobacco plants, for example by immersing bruised leaves or chopped leaves in an agrobacterial solution and then culturing them in suitable media. The transformation of plants by means of Agrobacterium tumefaciens is described, for example, by Hofgen and Willmitzer in Nucl. Acid Res. (1988) 16, 9877 or is known inter alia from F. F. White, Vectors for Gene Transfer in Higher Plants; in Transgenic Plants, Vol. 1, Engineering and Utilization, eds. S. D. Kung and R. Wu, Academic Press, 1993, pp. 15-38.

[0127] In addition to the transformation of somatic cells, which then have to be regenerated into intact plants, it is also possible to transform the cells of plant meristems and in particular those cells which develop into gametes. In this case, the transformed gametes follow the natural plant development, giving rise to transgenic plants. Thus, for example, seeds of Arabidopsis are treated with agrobacteria and seeds are obtained from the developing plants of which a certain proportion is transformed and thus transgenic [Feldman, K A and Marks M D (1987). Mol Gen Genet 208:274-289; Feldmann K (1992). In: C Koncz, N-H Chua and J Shell, eds, Methods in Arabidopsis Research. Word Scientific, Singapore, pp. 274-289]. Alternative methods are based on the repeated removal of the inflorescences and incubation of the excision site in the center of the rosette with transformed agrobacteria, whereby transformed seeds can likewise be obtained at a later point in time (Chang (1994). Plant J. 5: 551-558; Katavic (1994). Mol Gen Genet, 245: 363-370). However, an especially effective method is the vacuum infiltration method with its modifications such as the “floral dip” method. In the case of vacuum infiltration of Arabidopsis, intact plants under reduced pressure are treated with an agrobacterial suspension [Bechthold, N (1993). C R Acad Sci Paris Life Sci, 316: 1194-1199], while in the case of the “floral dip” method the developing floral tissue is incubated briefly with a surfactant-treated agrobacterial suspension [Clough, S J and Bent A F (1998) The Plant J. 16, 735-743]. A certain proportion of transgenic seeds are harvested in both cases, and these seeds can be distinguished from non-transgenic seeds by growing under the above-described selective conditions. In addition the stable transformation of plastids is of advantages because plastids are inherited maternally is most crops reducing or eliminating the risk of transgene flow through pollen. The transformation of the chloroplast genome is generally achieved by a process which has been schematically displayed in Klaus et al., 2004 [Nature Biotechnology 22 (2), 225-229]. Briefly the sequences to be transformed are cloned together with a selectable marker gene between flanking sequences homologous to the chloroplast genome. These homologous flanking sequences direct site specific integration into the plastome. Plastidal transformation has been described for many different plant species and an overview is given in Bock (2001) Transgenic plastids in basic research and plant biotechnology. J Mol Biol. 2001 Sep. 21; 312 (3):425-38 or Maliga, P (2003) Progress towards commercialization of plastid transformation technology. Trends Biotechnol. 21, 20-28. Further biotechnological progress has recently been reported in form of marker free plastid transformants, which can be produced by a transient co-integrated maker gene (Klaus et al., 2004, Nature Biotechnology 22(2), 225-229).

[0128] The genetically modified plant cells can be regenerated via all methods with which the skilled worker is familiar. Suitable methods can be found in the abovementioned publications by S. D. Kung and R. Wu, Potrykus or Hofgen and Willmitzer. Generally after transformation, plant cells or cell groupings are selected for the presence of one or more markers which are encoded by plant-expressible genes co-transferred with the gene of interest, following which the transformed material is regenerated into a whole plant. To select transformed plants, the plant material obtained in the transformation is, as a rule, subjected to selective conditions so that transformed plants can be distinguished from untransformed plants. For example, the seeds obtained in the above-described manner can be planted and, after an initial growing period, subjected to a suitable selection by spraying. A further possibility consists in growing the seeds, if appropriate after sterilization, on agar plates using a suitable selection agent so that only the transformed seeds can grow into plants. Alternatively, the transformed plants are screened for the presence of a selectable marker such as the ones described above.

[0129] Following DNA transfer and regeneration, putatively transformed plants may also be evaluated, for instance using Southern analysis, for the presence of the gene of interest, copy number and/or genomic organisation. Alternatively or additionally, expression levels of the newly introduced DNA may be monitored using Northern and/or Western analysis, both techniques being well known to persons having ordinary skill in the art.

[0130] The generated transformed plants may be propagated by a variety of means, such as by clonal propagation or classical breeding techniques. For example, a first generation (or T1) transformed plant may be selfed and homozygous second-generation (or T2) transformants selected, and the T2 plants may then further be propagated through classical breeding techniques. The generated transformed organisms may take a variety of forms. For example, they may be chimeras of transformed cells and non-transformed cells; clonal transformants (e.g., all cells transformed to contain the expression cassette); grafts of transformed and untransformed tissues (e.g., in plants, a transformed rootstock grafted to an untransformed scion).

### T-DNA Activation Tagging

[0131] T-DNA activation tagging (Hayashi et al. Science (1992) 1350-1353), involves insertion of T-DNA, usually containing a promoter (may also be a translation enhancer or an intron), in the genomic region of the gene of interest or 10 kb up- or downstream of the coding region of a gene in a configuration such that the promoter directs expression of the targeted gene. Typically, regulation of expression of the targeted gene by its natural promoter is disrupted and the gene falls under the control of the newly introduced promoter. The promoter is typically embedded in a T-DNA. This T-DNA is randomly inserted into the plant genome, for example, through Agrobacterium infection and leads to modified expression of genes near the inserted T-DNA. The resulting transgenic plants show dominant phenotypes due to modified expression of genes close to the introduced promoter.

### TILLING

[0132] The term “TILLING” is an abbreviation of “Targeted Induced Local Lesions In Genomes” and refers to a mutagenesis technology useful to generate and/or identify nucleic acids encoding proteins with modified expression and/or activity. TILLING also allows selection of plants carrying such mutant variants. These mutant variants may exhibit modified expression, either in strength or in location or in timing (if the mutations affect the promoter for example). These mutant variants may exhibit higher activity than that exhibited by the gene in its natural form. TILLING combines high-density mutagenesis with high-throughput screening methods. The steps typically followed in TILLING are: (a) EMS mutagenesis (Redei GP and Koncz C (1992) In Methods in Arabidopsis Research, Koncz C, Chua N H, Schell J, eds. Singapore, World Scientific Publishing Co, pp. 16-82; Feldmann et al., (1994) In Meyerowitz E M, Somerville C R, eds, Arabidopsis. Cold Spring Harbor Laboratory Press, Cold Spring Harbor, N.Y., pp 137-172; Lightner J and Caspar T (1998) In J Martinez-Zapater, J Salinas, eds, Methods on Molecular Biology, Vol. 82. Humana Press, Totowa, N.J., pp 91-104); (b) DNA preparation and pooling of individuals; (c) PCR amplification of a region of interest; (d) denaturation and annealing to allow formation of heteroduplexes; (e) DHPLC, where the presence of a heteroduplex in a pool is detected as an extra peak in the chromatogram; (f) identification of the mutant individual; and (g) sequencing of the mutant PCR product. Methods for TILLING are well known in the art (McCallum et al., (2000) Nat Biotechnol 18: 455-457; reviewed by Stemple (2004) Nat Rev Genet 5(2): 145-50).

### Homologous Recombination

[0133] Homologous recombination allows introduction in a genome of a selected nucleic acid at a defined selected position. Homologous recombination is a standard technology used routinely in biological sciences for lower organisms such as yeast or the moss Physcomitrella. Methods for performing homologous recombination in plants have been described not only for model plants (Offringa et al. (1990) EMBO J 9(10): 3077-84) but also for crop plants, for example rice (Terada et al. (2002) Nat Biotech 20(10): 1030-4; Iida and Terada (2004) Curr Opin Biotech 15(2): 132-8), and approaches exist that are generally applicable regardless of the target organism (Miller et al, Nature Biotechnol. 25, 778-785, 2007).

### Yield Related Traits

[0134] Yield related traits comprise one or more of yield, biomass, seed yield, early vigour, greenness index, increased growth rate, improved agronomic traits (such as improved Water Use Efficiency (WUE), Nitrogen Use Efficiency (NUE), etc.).

### Yield

[0135] The term “yield” in general means a measurable produce of economic value, typically related to a specified crop, to an area, and to a period of time. Individual plant parts directly contribute to yield based on their number, size and/or weight, or the actual yield is the yield per square meter for a crop and year, which is determined by dividing total production (includes both harvested and appraised production) by planted square meters. The term “yield” of a plant may relate to vegetative biomass (root and/or shoot biomass), to reproductive organs, and/or to propagules (such as seeds) of that plant.

[0136] Taking corn as an example, a yield increase may be manifested as one or more of the following: increase in the number of plants established per square meter, an increase in the number of ears per plant, an increase in the number of rows, number of kernels per row, kernel weight, thousand kernel weight, ear length/diameter, increase in the seed filling rate (which is the number of filled seeds divided by the total number of seeds and multiplied by 100), among others. Taking rice as an example, a yield increase may manifest itself as an increase in one or more of the following: number of plants per square meter, number of panicles per plant, panicle length, number of spikelets per panicle, number of flowers (florets) per panicle, increase in the seed filling rate (which is the number of filled seeds divided by the total number of seeds and multiplied by 100), increase in thousand kernel weight, among others. In rice, submergence tolerance may also result in increased yield.

### Early Vigour

[0137] “Early vigour” refers to active healthy well-balanced growth especially during early stages of plant growth, and may result from increased plant fitness due to, for example, the plants being better adapted to their environment (i.e. optimizing the use of energy resources and partitioning between shoot and root). Plants having early vigour also show increased seedling survival and a better establishment of the crop, which often results in highly uniform fields (with the crop growing in uniform manner, i.e. with the majority of plants reaching the various stages of development at substantially the same time), and often better and higher yield. Therefore, early vigour may be determined by measuring various factors, such as thousand kernel weight, percentage germination, percentage emergence, seedling growth, seedling height, root length, root and shoot biomass and many more.

### Increased Growth Rate

[0138] The increased growth rate may be specific to one or more parts of a plant (including seeds), or may be throughout substantially the whole plant. Plants having an increased growth rate may have a shorter life cycle. The life cycle of a plant may be taken to mean the time needed to grow from a dry mature seed up to the stage where the plant has produced dry mature seeds, similar to the starting material. This life cycle may be influenced by factors such as speed of germination, early vigour, growth rate, greenness index, flowering time and speed of seed maturation. The increase in growth rate may take place at one or more stages in the life cycle of a plant or during substantially the whole plant life cycle. Increased growth rate during the early stages in the life cycle of a plant may reflect enhanced vigour. The increase in growth rate may alter the harvest cycle of a plant allowing plants to be sown later and/or harvested sooner than would otherwise be possible (a similar effect may be obtained with earlier flowering time). If the growth rate is sufficiently increased, it may allow for the further sowing of seeds of the same plant species (for example sowing and harvesting of rice plants followed by sowing and harvesting of further rice plants all within one conventional growing period). Similarly, if the growth rate is sufficiently increased, it may allow for the further sowing of seeds of different plants species (for example the sowing and harvesting of corn plants followed by, for example, the sowing and optional harvesting of soybean, potato or any other suitable plant). Harvesting additional times from the same rootstock in the case of some crop plants may also be possible. Altering the harvest cycle of a plant may lead to an increase in annual biomass production per square meter (due to an increase in the number of times (say in a year) that any particular plant may be grown and harvested). An increase in growth rate may also allow for the cultivation of transgenic plants in a wider geographical area than their wild-type counterparts, since the territorial limitations for growing a crop are often determined by adverse environmental conditions either at the time of planting (early season) or at the time of harvesting (late season). Such adverse conditions may be avoided if the harvest cycle is shortened. The growth rate may be determined by deriving various parameters from growth curves, such parameters may be: T-Mid (the time taken for plants to reach 50% of their maximal size) and T-90 (time taken for plants to reach 90% of their maximal size), amongst others.

### Stress Resistance

[0139] An increase in yield and/or growth rate occurs whether the plant is under non-stress conditions or whether the plant is exposed to various stresses compared to control plants. Plants typically respond to exposure to stress by growing more slowly. In conditions of severe stress, the plant may even stop growing altogether. Mild stress on the other hand is defined herein as being any stress to which a plant is exposed which does not result in the plant ceasing to grow altogether without the capacity to resume growth. Mild stress in the sense of the invention leads to a reduction in the growth of the stressed plants of less than 40%, 35%, 30% or 25%, more preferably less than 20% or 15% in comparison to the control plant under non-stress conditions. Due to advances in agricultural practices (irrigation, fertilization, pesticide treatments) severe stresses are not often encountered in cultivated crop plants. As a consequence, the compromised growth induced by mild stress is often an undesirable feature for agriculture. Mild stresses are the everyday biotic and/or abiotic (environmental) stresses to which a plant is exposed. Abiotic stresses may be due to drought or excess water, anaerobic stress, salt stress, chemical toxicity, oxidative stress and hot, cold or freezing temperatures. The abiotic stress may be an osmotic stress caused by a water stress (particularly due to drought), salt stress, oxidative stress or an ionic stress. Biotic stresses are typically those stresses caused by pathogens, such as bacteria, viruses, fungi, nematodes and insects.

[0140] In particular, the methods of the present invention may be performed under non-stress conditions or under conditions of mild drought to give plants having increased yield relative to control plants. As reported in Wang et al. (Planta (2003) 218: 1-14), abiotic stress leads to a series of morphological, physiological, biochemical and molecular changes that adversely affect plant growth and productivity. Drought, salinity, extreme temperatures and oxidative stress are known to be interconnected and may induce growth and cellular damage through similar mechanisms. Rabbani et al. (Plant Physiol (2003) 133: 1755-1767) describes a particularly high degree of “cross talk” between drought stress and high-salinity stress. For example, drought and/or salinisation are manifested primarily as osmotic stress, resulting in the disruption of homeostasis and ion distribution in the cell. Oxidative stress, which frequently accompanies high or low temperature, salinity or drought stress, may cause denaturing of functional and structural proteins. As a consequence, these diverse environmental stresses often activate similar cell signalling pathways and cellular responses, such as the production of stress proteins, up-regulation of anti-oxidants, accumulation of compatible solutes and growth arrest. The term “non-stress” conditions as used herein are those environmental conditions that allow optimal growth of plants. Persons skilled in the art are aware of normal soil conditions and climatic conditions for a given location. Plants with optimal growth conditions, (grown under non-stress conditions) typically yield in increasing order of preference at least 97%, 95%, 92%, 90%, 87%, 85%, 83%, 80%, 77% or 75% of the average production of such plant in a given environment. Average production may be calculated on harvest and/or season basis. Persons skilled in the art are aware of average yield productions of a crop.

[0141] Nutrient deficiency may result from a lack of nutrients such as nitrogen, phosphates and other phosphorous-containing compounds, potassium, calcium, magnesium, manganese, iron and boron, amongst others.

[0142] The term salt stress is not restricted to common salt (NaCl), but may be any one or more of: NaCl, KCl, LiCl, MgCl₂, CaCl₂, amongst others.

### Increase/Improve/Enhance

[0143] The terms “increase”, “improve” or “enhance” are interchangeable and shall mean in the sense of the application at least a 3%, 4%, 5%, 6%, 7%, 8%, 9% or 10%, preferably at least 15% or 20%, more preferably 25%, 30%, 35% or 40% more yield and/or growth in comparison to control plants as defined herein.

### Seed Yield

[0144] Increased seed yield may manifest itself as one or more of the following: a) an increase in seed biomass (total seed weight) which may be on an individual seed basis and/or per plant and/or per square meter; b) increased number of flowers per plant; c) increased number of (filled) seeds; d) increased seed filling rate (which is expressed as the ratio between the number of filled seeds divided by the total number of seeds); e) increased harvest index, which is expressed as a ratio of the yield of harvestable parts, such as seeds, divided by the total biomass; and f) increased thousand kernel weight (TKW), which is extrapolated from the number of filled seeds counted and their total weight. An increased TKW may result from an increased seed size and/or seed weight, and may also result from an increase in embryo and/or endosperm size.

[0145] An increase in seed yield may also be manifested as an increase in seed size and/or seed volume. Furthermore, an increase in seed yield may also manifest itself as an increase in seed area and/or seed length and/or seed width and/or seed perimeter. Increased yield may also result in modified architecture, or may occur because of modified architecture.

### Greenness Index

[0146] The “greenness index” as used herein is calculated from digital images of plants. For each pixel belonging to the plant object on the image, the ratio of the green value versus the red value (in the RGB model for encoding color) is calculated. The greenness index is expressed as the percentage of pixels for which the green-to-red ratio exceeds a given threshold. Under normal growth conditions, under salt stress growth conditions, and under reduced nutrient availability growth conditions, the greenness index of plants is measured in the last imaging before flowering. In contrast, under drought stress growth conditions, the greenness index of plants is measured in the first imaging after drought.

### Marker Assisted Breeding

[0147] Such breeding programmes sometimes require introduction of allelic variation by mutagenic treatment of the plants, using for example EMS mutagenesis; alternatively, the programme may start with a collection of allelic variants of so called “natural” origin caused unintentionally. Identification of allelic variants then takes place, for example, by PCR. This is followed by a step for selection of superior allelic variants of the sequence in question and which give increased yield. Selection is typically carried out by monitoring growth performance of plants containing different allelic variants of the sequence in question. Growth performance may be monitored in a greenhouse or in the field. Further optional steps include crossing plants in which the superior allelic variant was identified with another plant. This could be used, for example, to make a combination of interesting phenotypic features.

[0148] Use as Probes in (Gene Mapping)

[0149] Use of nucleic acids encoding the protein of interest for genetically and physically mapping the genes requires only a nucleic acid sequence of at least 15 nucleotides in length. These nucleic acids may be used as restriction fragment length polymorphism (RFLP) markers. Southern blots (Sambrook J, Fritsch E F and Maniatis T (1989) Molecular Cloning, A Laboratory Manual) of restriction-digested plant genomic DNA may be probed with the nucleic acids encoding the protein of interest. The resulting banding patterns may then be subjected to genetic analyses using computer programs such as MapMaker (Lander et al. (1987) Genomics 1: 174-181) in order to construct a genetic map. In addition, the nucleic acids may be used to probe Southern blots containing restriction endonuclease-treated genomic DNAs of a set of individuals representing parent and progeny of a defined genetic cross. Segregation of the DNA polymorphisms is noted and used to calculate the position of the nucleic acid encoding the protein of interest in the genetic map previously obtained using this population (Botstein et al. (1980) Am. J. Hum. Genet. 32:314-331).

[0150] The production and use of plant gene-derived probes for use in genetic mapping is described in Bernatzky and Tanksley (1986) Plant Mol. Biol. Reporter 4: 37-41. Numerous publications describe genetic mapping of specific cDNA clones using the methodology outlined above or variations thereof. For example, F2 intercross populations, backcross populations, randomly mated populations, near isogenic lines, and other sets of individuals may be used for mapping. Such methodologies are well known to those skilled in the art.

[0151] The nucleic acid probes may also be used for physical mapping (i.e., placement of sequences on physical maps; see Hoheisel et al. In: Non-mammalian Genomic Analysis: A Practical Guide, Academic press 1996, pp. 319-346, and references cited therein).

[0152] In another embodiment, the nucleic acid probes may be used in direct fluorescence in situ hybridisation (FISH) mapping (Trask (1991) Trends Genet. 7:149-154). Although current methods of FISH mapping favour use of large clones (several kb to several hundred kb; see Laan et al. (1995) Genome Res. 5:13-20), improvements in sensitivity may allow performance of FISH mapping using shorter probes.

[0153] A variety of nucleic acid amplification-based methods for genetic and physical mapping may be carried out using the nucleic acids. Examples include allele-specific amplification (Kazazian (1989) J. Lab. Clin. Med 11:95-96), polymorphism of PCR-amplified fragments (CAPS; Sheffield et al. (1993) Genomics 16:325-332), allele-specific ligation (Landegren et al. (1988) Science 241:1077-1080), nucleotide extension reactions (Sokolov (1990) Nucleic Acid Res. 18:3671), Radiation Hybrid Mapping (Walter et al. (1997) Nat. Genet. 7:22-28) and Happy Mapping (Dear and Cook (1989) Nucleic Acid Res. 17:6795-6807). For these methods, the sequence of a nucleic acid is used to design and produce primer pairs for use in the amplification reaction or in primer extension reactions. The design of such primers is well known to those skilled in the art. In methods employing PCR-based genetic mapping, it may be necessary to identify DNA sequence differences between the parents of the mapping cross in the region corresponding to the instant nucleic acid sequence. This, however, is generally not necessary for mapping methods.

### Plant

[0154] The term “plant” as used herein encompasses whole plants, ancestors and progeny of the plants and plant parts, including seeds, shoots, stems, leaves, roots (including tubers), flowers, and tissues and organs, wherein each of the aforementioned comprise the gene/nucleic acid of interest. The term “plant” also encompasses plant cells, suspension cultures, callus tissue, embryos, meristematic regions, gametophytes, sporophytes, pollen and microspores, again wherein each of the aforementioned comprises the gene/nucleic acid of interest.

[0155] Plants that are particularly useful in the methods of the invention include all plants which belong to the superfamily Viridiplantae, in particular monocotyledonous and dicotyledonous plants including fodder or forage legumes, ornamental plants, food crops, trees or shrubs selected from the list comprising Acer spp., Actinidia spp., Abelmoschus spp., Agave sisalana, Agropyron spp., Agrostis stolonifera, Allium spp., Amaranthus spp., Ammophila arenaria, Ananas comosus, Annona spp., Apium graveolens, Arachis spp, Artocarpus spp., Asparagus officinalis, Avena spp. (e.g.Avena sativa, Avena fatua, Avena byzantina, Avena fatua var. sativa, Avena hybrida), Averrhoa carambola, Bambusa sp., Benincasa hispida, Bertholletia excelsea, Beta vulgaris, Brassica spp. (e.g. Brassica napus, Brassica rapa ssp. [canola, oilseed rape, turnip rape]), Cadaba farinosa, Camellia sinensis, Canna indica, Cannabis sativa, Capsicum spp., Carex elata, Carica papaya, Carissa macrocarpa, Carya spp., Carthamus tinctorius, Castanea spp., Ceiba pentandra, Cichorium endivia, Cinnamomum spp., Citrullus lanatus, Citrus spp., Cocos spp., Coffea spp., Colocasia esculenta, Cola spp., Corchorus sp., Coriandrum sativum, Corylus spp., Crataegus spp., Crocus sativus, Cucurbita spp., Cucumis spp., Cynara spp., Daucus carota, Desmodium spp., Dimocarpus longan, Dioscorea spp., Diospyros spp., Echinochloa spp., Elaeis (e.g. Elaeis guineensis, Elaeis oleifera), Eleusine coracana, Eragrostis tef, Erianthus sp., Eriobotrya japonica, Eucalyptus sp., Eugenia uniflora, Fagopyrum spp., Fagus spp., Festuca arundinacea, Ficus carica, Fortunella spp., Fragaria spp., Ginkgo biloba, Glycine spp. (e.g. Glycine max, Soja hispida or Soja max), Gossypium hirsutum, Helianthus spp. (e.g. Helianthus annuus), Hemerocaffis fulva, Hibiscus spp., Hordeum spp. (e.g. Hordeum vulgare), Ipomoea batatas, Juglans spp., Lactuca sativa, Lathyrus spp., Lens culinaris, Linum usitatissimum, Litchi chinensis, Lotus spp., Luffa acutangula, Lupinus spp., Luzula sylvatica, Lycopersicon spp. (e.g. Lycopersicon esculentum, Lycopersicon lycopersicum, Lycopersicon pyriforme), Macrotyloma spp., Malus spp., Malpighia emarginata, Mammea americana, Mangifera indica, Manihot spp., Manilkara zapota, Medicago sativa, Melilotus spp., Mentha spp., Miscanthus sinensis, Momordica spp., Morus nigra, Musa spp., Nicotiana spp., Olea spp., Opuntia spp., Ornithopus spp., Oryza spp. (e.g. Oryza sativa, Oryza latifolia), Panicum miliaceum, Panicum virgatum, Passiflora edulis, Pastinaca sativa, Pennisetum sp., Persea spp., Petroselinum crispum, Phalaris arundinacea, Phaseolus spp., Phleum pratense, Phoenix spp., Phragmites australis, Physalis spp., Pinus spp., Pistacia vera, Pisum spp., Poa spp., Populus spp., Prosopis spp., Prunus spp., Psidium spp., Punica granatum, Pyrus communis, Quercus spp., Raphanus sativus, Rheum rhabarbarum, Ribes spp., Ricinus communis, Rubus spp., Saccharum spp., Salix sp., Sambucus spp., Secale cereale, Sesamum spp., Sinapis sp., Solanum spp. (e.g. Solanum tuberosum, Solanum integrifolium or Solanum lycopersicum), Sorghum bicolor, Spinacia spp., Syzygium spp., Tagetes spp., Tamarindus indica, Theobromai cacao, Trifolium spp., Tripsacum dactyloides, Triticosecale rimpaui, Triticum spp. (e.g. Triticum aestivum, Triticum durum, Triticum turgidum, Triticum hybernum, Triticum macha, Triticum sativum, Triticum monococcum or Triticum vulgare), Tropaeolum minus, Tropaeolum majus, Vaccinium spp., Vicia spp., Vigna spp., Viola odorata, Vitis spp., Zea mays, Zizania palustris, Ziziphus spp., amongst others.

### Control Plant(s)

[0156] The choice of suitable control plants is a routine part of an experimental setup and may include corresponding wild type plants or corresponding plants without the gene of interest. The control plant is typically of the same plant species or even of the same variety as the plant to be assessed. The control plant may also be a nullizygote of the plant to be assessed. Nullizygotes are individuals missing the transgene by segregation. A “control plant” as used herein refers not only to whole plants, but also to plant parts, including seeds and seed parts.

### DETAILED DESCRIPTION OF THE INVENTION

[0157] Surprisingly, it has now been found that modulating expression in a plant of a nucleic acid encoding a HSFA4 or a HSFA5 polypeptide gives plants having enhanced yield-related traits relative to control plants. According to a first embodiment, the present invention provides a method for enhancing yield-related traits in plants relative to control plants, comprising modulating expression in a plant of a nucleic acid encoding a HSFA4 or a HSFA5 polypeptide and/or modulating the level and/or the activity of a HSFA4 protein and optionally selecting for plants having enhanced yield-related traits.

[0158] Furthermore it has now surprisingly been found that modulating expression in a plant of a nucleic acid encoding an OPT4-like polypeptide gives plants having enhanced yield-related traits relative to control plants.

[0159] The present invention also provides hitherto unknown OPT4-like nucleic acid and polypeptide sequences.

[0160] There is provided an isolated nucleic acid molecule comprising:
[0161] (a) a nucleic acid represented by SEQ ID NO: 189 or SEQ ID NO: 191;
[0162] (b) the complement of a nucleic acid represented by SEQ ID NO: 189 or SEQ ID NO: 191;
[0163] (c) a nucleic acid encoding an OPT4-like polypeptide comprising Motif I: NPG and Motif II: KIPPR and having, in increasing order of preference, at least 50%, 55%, 60%, 65%, 70%, 75%, 80%, 85%, 90%, 95%, 96%, 97%, 98%, 99% or more sequence identity to the amino acid sequence represented by SEQ ID NO: 190 or SEQ ID NO: 192.

[0164] There is further provided an isolated polypeptide comprising:
[0165] (a) an amino acid sequence represented by SEQ ID NO: 190 or SEQ ID NO: 192;
[0166] (b) an amino acid sequence comprising Motif I: NPG and Motif II: KIPPR and having, in increasing order of preference, at least 50%, 55%, 60%, 65%, 70%, 75%, 80%, 85%, 90%, 95%, 96%, 97%, 98%, 99% or more sequence identity to the amino acid sequence represented by SEQ ID NO: 190 or SEQ ID NO: 192.
[0167] (c) derivatives of any of the amino acid sequences given in (i) or (ii) above.

[0168] According to one embodiment, the present invention provides a method for enhancing yield-related traits in plants relative to control plants, comprising modulating expression in a plant of a nucleic acid encoding an OPT4-like polypeptide and optionally selecting for plants having enhanced yield-related traits.

[0169] Furthermore it has now surprisingly been found that modulating expression in a plant of a nucleic acid encoding a PLA2-like polypeptide gives plants having enhanced yield-related traits relative to control plants. According to a first embodiment, the present invention provides a method for enhancing yield-related traits in plants relative to control plants, comprising modulating expression in a plant of a nucleic acid encoding a PLA2-like polypeptide and optionally selecting for plants having enhanced yield-related traits.

[0170] Furthermore it has now surprisingly been found that modulating expression in a plant of a nucleic acid encoding a WOX1-like polypeptide gives plants having enhanced yield-related traits relative to control plants. According to a first embodiment, the present invention provides a method for enhancing yield-related traits in plants relative to control plants, comprising modulating expression in a plant of a nucleic acid encoding a WOX1-like polypeptide and optionally selecting for plants having enhanced yield-related traits.

[0171] A preferred method for modulating expression of a nucleic acid encoding a HSFA4 or a HSFA5 polypeptide, or an OPT4-like polypeptide, or a PLA2-like polypeptide, or a WOX1-like polypeptide, is by introducing and expressing in a plant a nucleic acid encoding a HSFA4 or a HSFA5 polypeptide, or an OPT4-like polypeptide, or a PLA2-like polypeptide, or a WOX1-like polypeptide, or a portion thereof.

[0172] Concerning HSD polypeptides, in one preferred embodiment the modulation of expression of the nucleic acid encoding a HSFA5 comprises increasing expression of said nucleic acid.

[0173] In another preferred embodiment the modulation of expression of the nucleic acid encoding a HSFA4 comprises decreasing or reducing or substantially eliminating the expression of said nucleic acid.

[0174] On a preferred embodiment the method for decreasing or reducing or substantially eliminating the expression of an endogenous HSFA4 gene and/or the level and/or the activity of a HSFA4 protein in said plant comprise introducing and expressing oligonucleotides substantially identical to any given contiguous in increasing order of preference 15-20, 20-50, 50-100, 100-200, 200-250 or more nucleotides of the endogeneous HSFA4 gene, preferably as represented by any of the HSFA4 nucleic acids of Table A1 more preferably by SEQ ID NO: 37.

[0175] Concerning HSF polypeptides, any reference hereinafter to a “protein useful in the methods of the invention” is taken to mean a HSFA4 or a HSFA5 polypeptide as defined herein. Any reference hereinafter to a “nucleic acid useful in the methods of the invention” is taken to mean a nucleic acid capable of encoding such a HSFA4 or a HSFA5 polypeptide. The nucleic acid to be introduced into a plant (and therefore useful in performing the methods of the invention) is any nucleic acid encoding the type of protein which will now be described, hereafter also named “HSFA4 or a HSFA5 nucleic acid” or “HSFA4 or a HSFA5 gene”.

[0176] Concerning OPT4-like polypeptides, any reference hereinafter to a “protein useful in the methods of the invention” is taken to mean an OPT4-like polypeptide as defined herein. Any reference hereinafter to a “nucleic acid useful in the methods of the invention” is taken to mean a nucleic acid capable of encoding such an OPT4-like polypeptide. The nucleic acid to be introduced into a plant (and therefore useful in performing the methods of the invention) is any nucleic acid encoding the type of protein which will now be described, hereafter also named “OPT4-like nucleic acid” or “OPT4-like gene”.

[0177] Concerning PLA2-like polypeptides, any reference hereinafter to a “protein useful in the methods of the invention” is taken to mean a PLA2-like polypeptide as defined herein. Any reference hereinafter to a “nucleic acid useful in the methods of the invention” is taken to mean a nucleic acid capable of encoding such a PLA2-like polypeptide. The nucleic acid to be introduced into a plant (and therefore useful in performing the methods of the invention) is any nucleic acid encoding the type of protein which will now be described, hereafter also named “PLA2-like nucleic acid” or “PLA2-like gene”.

[0178] Concerning WOX1-like polypeptides, any reference hereinafter to a “protein useful in the methods of the invention” is taken to mean a WOX1-like polypeptide as defined herein. Any reference hereinafter to a “nucleic acid useful in the methods of the invention” is taken to mean a nucleic acid capable of encoding such a WOX1-like polypeptide. The nucleic acid to be introduced into a plant (and therefore useful in performing the methods of the invention) is any nucleic acid encoding the type of protein which will now be described, hereafter also named “WOX1-like nucleic acid” or “WOX1-like gene”.

[0179] A “Heat Shock Factor Class A4 and A5 (HSFA4 and HSFA5) polypeptide”, as defined herein refers to any polypeptide comprising a domain or a motif having in increasing order of preference at least 50%, 51%, 52%, 53%, 54%, 55%, 56%, 57%, 58%, 59%, 60%, 61%, 62%, 63%, 64%, 65%, 66%, 67%, 68%, 69%, 70%, 71%, 72%, 73%, 74%, 75%, 76%, 77%, 78%, 79%, 80%, 81%, 82%, 83%, 84%, 85%, 86%, 87%, 88%, 89%, 90%, 91%, 92%, 93%, 94%, 95%, 96%, 97%, 98%, or 99% overall sequence identity to the amino acid represented by:
[0180] i) SEQ ID NO: 47 to SEQ ID NO: 70 (DNA binding domain); and
[0181] ii) SEQ ID NO: 71 to SEQ ID NO: 94 (Oligomerisation domain); and
[0182] iii) SEQ ID NO: 95 to SEQ ID NO: 118 (Activation AHA motif); and
[0183] iv) wherein the polypeptide is a HSFA5 polypeptide:
   [0184] a. SEQ ID NO:119 to SEQ ID NO: 127 (HSF5A motif I); and/or
   [0185] b. SEQ ID NO:128 to SEQ ID NO: 136 (HSF5A motif II); and
[0186] v) wherein the polypeptide is a HSF4A polypeptide:
   [0187] a. SEQ ID NO:137 to SEQ ID NO: 151 (HSF4A motif I).

[0188] In addition a Heat Shock Factor useful in the methods of the invention is capable of binding to a heat shock element in the promoter of a heat stress-inducible gene. The heat shock element in the promoter comprises the palindromic sequences, AGAA and TTCT separated by one or more nucleotides, preferably by at least 2, 5, 10, 15, 20, 25, 30, 35, 40, 45, 50, 55, 60, 70, 80, 90, and 100.

[0189] Preferably the Heat Shock Factor comprises a HSF DNA-binding domain as characterized by the Interpro entry number IPR000232 and/or the Pfam entry PF00447.

[0190] Alternatively, the homologue of a HSFA4 or HSFA5 protein has in increasing order of preference at least 25%, 26%, 27%, 28%, 29%, 30%, 31%, 32%, 33%, 34%, 35%, 36%, 37%, 38%, 39%, 40%, 41%, 42%, 43%, 44%, 45%, 46%, 47%, 48%, 49%, 50%, 51%, 52%, 53%, 54%, 55%, 56%, 57%, 58%, 59%, 60%, 61%, 62%, 63%, 64%, 65%, 66%, 67%, 68%, 69%, 70%, 71%, 72%, 73%, 74%, 75%, 76%, 77%, 78%, 79%, 80%, 81%, 82%, 83%, 84%, 85%, 86%, 87%, 88%, 89%, 90%, 91%, 92%, 93%, 94%, 95%, 96%, 97%, 98%, or 99% overall sequence identity to the amino acid represented by SEQ ID NO: 2 for a HSFA5 homologue or by SEQ ID NO: 38 for a HSFA4 homologue, provided that the homologous protein comprises the conserved motifs as outlined above. The overall sequence identity is determined using a global alignment algorithm, such as the Needleman Wunsch algorithm in the program GAP (GCG Wisconsin Package, Accelrys), preferably with default parameters and preferably with sequences of mature proteins (i.e. without taking into account secretion signals or transit peptides). Compared to overall sequence identity, the sequence identity will generally be higher when only conserved domains or motifs are considered. For local alignments, the Smith-Waterman algorithm is particularly useful (Smith T F, Waterman M S (1981) J. Mol. Biol 147(1); 195-7).

[0191] Preferably, the polypeptide sequence which, when used in the construction of a phylogenetic tree of Arabidopsis tomato and rice HSFs, such as the one described in Koskill-Doring et al. 2007 and depicted in FIG. 2, clusters within the A4 clade defined by AtA4a, AtA4b, AtA4c, OsA4b, OsA4d, and LeA4b polypeptides for HSFA4 polypeptides or with the A5 clade defined by AtA5, OsA5 and LeA5 polypeptides for HSFA5 polypeptides.

[0192] An “OPT4-like polypeptide” as defined herein refers to any polypeptide comprising Motif I and

[0193] Motif II as defined below.

| | |
|---|---|
| Motif I: | NPG |
| Motif II: | KIPPR |

[0194] Preferably, the OPT4-like polypeptide when used in the construction of a phylogenetic tree, such as the one depicted in FIG. 5, clusters with the group of OPT4-like polypeptides defined by Clade I, II, III or IV, most preferably to the Clade comprising the amino acid sequence represented by SEQ ID NO: 156.

[0195] OPT4-like polypeptides typically have OPT (oligopeptide transporter) activity. Such activity may be measured as described in Osawa et al., 2006 (Biochem J. 2006 Jan. 1; 393(Pt 1):267-75).

[0196] An additional feature of OPT4-like polypeptides is that they are membrane-localised proteins.

[0197] Alternatively or additionally, the OPT4-like protein has in increasing order of preference at least 25%, 26%, 27%, 28%, 29%, 30%, 31%, 32%, 33%, 34%, 35%, 36%, 37%, 38%, 39%, 40%, 41%, 42%, 43%, 44%, 45%, 46%, 47%, 48%, 49%, 50%, 51%, 52%, 53%, 54%, 55%, 56%, 57%, 58%, 59%, 60%, 61%, 62%, 63%, 64%, 65%, 66%, 67%, 68%, 69%, 70%, 71%, 72%, 73%, 74%, 75%, 76%, 77%, 78%, 79%, 80%, 81%, 82%, 83%, 84%, 85%, 86%, 87%, 88%, 89%, 90%, 91%, 92%, 93%, 94%, 95%, 96%, 97%, 98%, or 99% overall sequence identity to the amino acid represented by SEQ ID NO: 156 or to any of the polypeptide sequences provided in Table A2 in the Examples Section herein. The overall sequence identity is determined using a global alignment algorithm, such as the Needleman Wunsch algorithm in the program GAP (GCG Wisconsin Package, Accelrys), preferably with default parameters and preferably with sequences of mature proteins (i.e. without taking into account secretion signals or transit peptides). Compared to overall sequence identity, the sequence identity will generally be higher when only conserved domains or motifs are considered. For local alignments, the Smith-Waterman algorithm is particularly useful (Smith T F, Waterman M S (1981) J. Mol. Biol 147(1); 195-7).

[0198] A “PLA2-like polypeptide” as defined herein refers to any polypeptide comprising an RNA recognition motif 2 and Motif III: T [TS] [VL] [MI] [IV] [KR] NIPN.

Preferably Motif III is: TTVMIKNIPN.

[0199] The PLA2-like polypeptide may additionally comprise Motif IV and/or Motif V.

| | |
|---|---|
| Motif IV: | SP[PA]RDG |
| Preferably Motif IV is: | SPPRDG |
| Motif V: | NK[CS]NVGYGFVN[ML]TSP[QE]A |
| Preferably Motif V is: | NKCNVGYGFVNMTSPQA |

[0200] Additionally or alternatively, the PLA2-like protein has in increasing order of preference at least 25%, 26%, 27%, 28%, 29%, 30%, 31%, 32%, 33%, 34%, 35%, 36%, 37%, 38%, 39%, 40%, 41%, 42%, 43%, 44%, 45%, 46%, 47%, 48%, 49%, 50%, 51%, 52%, 53%, 54%, 55%, 56%, 57%, 58%, 59%, 60%, 61%, 62%, 63%, 64%, 65%, 66%, 67%, 68%, 69%, 70%, 71%, 72%, 73%, 74%, 75%, 76%, 77%, 78%, 79%, 80%, 81%, 82%, 83%, 84%, 85%, 86%, 87%, 88%, 89%, 90%, 91%, 92%, 93%, 94%, 95%, 96%, 97%, 98%, or 99% overall sequence identity to the amino acid represented by SEQ ID NO: 253 and comprises an RNA recognition motif 2 and Motif III: T [TS] [VL] [MI] [IV] [KR] NIPN. Preferably, PLA2-like protein further comprises Motif IV and/or V.

[0201] The overall sequence identity is determined using a global alignment algorithm, such as the Needleman Wunsch algorithm in the program GAP (GCG Wisconsin Package, Accelrys), preferably with default parameters and preferably with sequences of mature proteins (i.e. without taking into account secretion signals or transit peptides). Compared to overall sequence identity, the sequence identity will generally be higher when only conserved domains or motifs are considered. For local alignments, the Smith-Waterman algorithm is particularly useful (Smith T F, Waterman M S (1981) J. Mol. Biol 147(1); 195-7).

[0202] Preferably, the polypeptide sequence which when used in the construction of a phylogenetic tree, such as the one depicted in FIG. 8, clusters with the sequences of Clade C or Clade D, and preferably with PLA2 Clade or PLA2b Clade, most preferably clustering with the amino acid sequence represented by SEQ ID NO: 253.

[0203] A “WOX1-like polypeptide” as defined herein refers to any polypeptide comprising a homeodomain represented by Motif VI: WNPTPEQLRTLEDLYRRGTRAPSTDQIQDITAQLR RYGRIEGKNVFYWFQNHKARERQK or a motif having in increasing order of preference at least 50%, 55%, 60%, 65%, 70%, 75%, 80%, 85%, 90%, 95%, 96%, 97%, 98%, 99% or more sequence identity to Motif I.

[0204] Additionally, a WOX1-like polypeptide comprises one or more of the following motifs: Motif VII: KNWAPS or a motif having in increasing order of preference at least 50%, 55%, 60%, 65%, 70%, 75%, 80%, 85%, 90%, 95%, 96%, 97%, 98%, 99% or more sequence identity to Motif VII.

[0205] Motif VIII: QTLQPFPLR or a motif having in increasing order of preference at least 50%, 55%, 60%, 65%, 70%, 75%, 80%, 85%, 90%, 95%, 96%, 97%, 98%, 99% or more sequence identity to Motif VIII. Motif VIII is a WUS-like motif but does not have an LELxL repressor motif close to EAR motif.

[0206] Motif IX: FEFLPLKH or a motif having in increasing order of preference at least 50%, 55%, 60%, 65%, 70%, 75%, 80%, 85%, 90%, 95%, 96%, 97%, 98%, 99% or more sequence identity to Motif IV.

[0207] Alternatively, the homologue of a WOX1-like protein has in increasing order of preference at least 25%, 26%, 27%, 28%, 29%, 30%, 31%, 32%, 33%, 34%, 35%, 36%, 37%, 38%, 39%, 40%, 41%, 42%, 43%, 44%, 45%, 46%, 47%, 48%, 49%, 50%, 51%, 52%, 53%, 54%, 55%, 56%, 57%, 58%, 59%, 60%, 61%, 62%, 63%, 64%, 65%, 66%, 67%, 68%, 69%, 70%, 71%, 72%, 73%, 74%, 75%, 76%, 77%, 78%, 79%, 80%, 81%, 82%, 83%, 84%, 85%, 86%, 87%, 88%, 89%, 90%, 91%, 92%, 93%, 94%, 95%, 96%, 97%, 98%, or 99% overall sequence identity to the amino acid represented by SEQ ID NO: 374 and comprises Motif I as defined above and preferably any one or more of Motifs VII, VIII and IX.

[0208] The overall sequence identity is determined using a global alignment algorithm, such as the Needleman Wunsch algorithm in the program GAP (GCG Wisconsin Package, Accelrys), preferably with default parameters and preferably with sequences of mature proteins (i.e. without taking into account secretion signals or transit peptides). Compared to overall sequence identity, the sequence identity will generally be higher when only conserved domains or motifs are considered. For local alignments, the Smith-Waterman algorithm is particularly useful (Smith T F, Waterman M S (1981) J. Mol. Biol 147(1); 195-7).

[0209] Preferably, the polypeptide sequence which when used in the construction of a phylogenetic tree, such as the one depicted in FIG. 11, clusters with the group of WOX1-like polypeptides comprising the amino acid sequence represented by SEQ ID NO: 374 rather than with any other group.

[0210] The terms “domain”, “signature” and “motif” are defined in the “definitions” section herein. Specialist databases exist for the identification of domains, for example, SMART (Schultz et al. (1998) Proc. Natl. Acad. Sci. USA 95, 5857-5864; Letunic et al. (2002) Nucleic Acids Res 30, 242-244), InterPro (Mulder et al., (2003) Nucl. Acids. Res. 31, 315-318), Prosite (Bucher and Bairoch (1994), A generalized profile syntax for biomolecular sequences motifs and its function in automatic sequence interpretation. (In) ISMB-94; Proceedings 2nd International Conference on Intelligent Systems for Molecular Biology. Altman R., Brutlag D., Karp P., Lathrop R., Searls D., Eds., pp 53-61, AAAI Press, Menlo Park; Hulo et al., Nucl. Acids. Res. 32:D134-D137, (2004)), or Pfam (Bateman et al., Nucleic Acids Research 30(1): 276-280 (2002)). A set of tools for in silico analysis of protein sequences is available on the ExPASy proteomics server (Swiss Institute of Bioinformatics (Gasteiger et al., ExPASy: the proteomics server for in-depth protein knowledge and analysis, Nucleic Acids Res. 31:3784-3788 (2003)). Domains or motifs may also be identified using routine techniques, such as by sequence alignment.

[0211] Methods for the alignment of sequences for comparison are well known in the art, such methods include GAP, BESTFIT, BLAST, FASTA and TFASTA. GAP uses the algorithm of Needleman and Wunsch ((1970) J Mol Biol 48: 443-453) to find the global (i.e. spanning the complete sequences) alignment of two sequences that maximizes the number of matches and minimizes the number of gaps. The BLAST algorithm (Altschul et al. (1990) J Mol Biol 215: 403-10) calculates percent sequence identity and performs a statistical analysis of the similarity between the two sequences. The software for performing BLAST analysis is publicly available through the National Centre for Biotechnology Information (NCBI). Homologues may readily be identified using, for example, the ClustalW multiple sequence alignment algorithm (version 1.83), with the default pairwise alignment parameters, and a scoring method in percentage. Global percentages of similarity and identity may also be determined using one of the methods available in the MatGAT software package (Campanella et al., BMC Bioinformatics. 2003 Jul. 10; 4:29. MatGAT: an application that generates similarity/identity matrices using protein or DNA sequences.). Minor manual editing may be performed to optimise alignment between conserved motifs, as would be apparent to a person skilled in the art. Furthermore, instead of using full-length sequences for the identification of homologues, specific domains may also be used. The sequence identity values may be determined over the entire nucleic acid or amino acid sequence or over selected domains or conserved motif(s), using the programs mentioned above using the default parameters. For local alignments, the Smith-Waterman algorithm is particularly useful (Smith T F, Waterman M S (1981) J. Mol. Biol 147(1); 195-7).

[0212] Furthermore, HSFA4 and HSFA5 polypeptides typically have DNA binding activity, being able to bind heat stress elements comprised in a promoter which may be of natural or synthetic origin. Tools and techniques for measuring DNA binding activity are well known in the art. The Activity of HSFA4 and HSFA5 polypeptides may be asses essentially as described by Baniwal et al. 2007. Additionally HSFA4 and HSFA5 polypeptides display a protein binding activity, thus HSFA4 is able to bind HSFA5. Methods to determine physical interaction between proteins are well known in the art. Binding between HSFA4 and HSFA5 polypeptides may be determine essentially as described by Baniwal et al; 2007.

[0213] In addition, a HSFA4 or a HSFA5 polypeptide, when expressed in rice according to the methods of the present invention as outlined in the Example section, give plants having increased yield related traits preferably selected from increased total seed weight (totalwgseeds), number of filled seeds (nrfilledseed), seed fill rate (fillrate), harvest index (harvestindex), thousand-kernel weight and number of primary panicles.

| | % increase in transgenic |
|---|---|
| | compared to control |
| Yield trait | plant |
| totalwgseeds | 30 |
| fillrate | 25 |
| harvestindex | 26 |
| nrfilledseed | 32 |

[0214] Additionally, a HSFA4 or a HSFA5 polypeptide may display a preferred subcellular localization, typically one or more of nuclear, citoplasmic, chloroplastic, or mitochondrial. The task of protein subcellular localisation prediction is important and well studied. Knowing a protein's localisation helps elucidate its function. Experimental methods for protein localization range from immunolocalization to tagging of proteins using green fluorescent protein (GFP) or beta-glucuronidase (GUS). Such methods are accurate although labor-intensive compared with computational methods. Recently much progress has been made in computational prediction of protein localisation from sequence data. Among algorithms well known to a person skilled in the art are available at the ExPASy Proteomics tools hosted by the Swiss Institute for Bioinformatics, for example, PSort, TargetP, ChloroP, LocTree, Predotar, LipoP, MITOPROT, PATS, PTS1, SignalP, TMHMM, and others.

[0215] Preferably the HSFA4 or the HSFA5 polypeptide useful in the methods of the invention localises to the nuclei upon heat treatment of the cell harbouring the HSF.

[0216] In addition, OPT4-like polypeptides, when expressed in rice according to the methods of the present invention as outlined in the Examples Section, give plants having increased yield related traits.

[0217] In addition, PLA2-like polypeptides, when expressed in rice according to the methods of the present invention as outlined in the Examples section, give plants having increased yield related traits, in particular increased seed yield.

[0218] Additionally, PLA2-like polypeptides may display a preferred subcellular localization, typically chloroplastic. Experimental methods for protein localization range from immunolocalization to tagging of proteins using green fluorescent protein (GFP) or beta-glucuronidase (GUS). Such methods are accurate although labour-intensive compared with computational methods. Recently much progress has been made in computational prediction of protein localisation from sequence data. Among algorithms well known to a person skilled in the art are available at the ExPASy Proteomics tools hosted by the Swiss Institute for Bioinformatics, for example, PSort, TargetP, ChloroP, LocTree, Predotar, LipoP, MITOPROT, PATS, PTS1, SignalP, TMHMM, and others.

[0219] In addition, WOX1-like polypeptides, when expressed in rice according to the methods of the present invention as outlined in the Examples section herein, give plants having increased yield related traits, in particular increased seed yield.

[0220] Additionally, WOX1-like polypeptides may display a preferred subcellular localization, typically one or more of nuclear, citoplasmic, chloroplastic, or mitochondrial. Recently much progress has been made in computational prediction of protein localisation from sequence data. Among algorithms well known to a person skilled in the art are available at the ExPASy Proteomics tools hosted by the Swiss Institute for Bioinformatics, for example, PSort, TargetP, ChloroP, LocTree, Predotar, LipoP, MITOPROT, PATS, PTS1, SignalP, TMHMM, and others.

[0221] Concerning HSF polypeptides, the present invention is illustrated by transforming plants with the nucleic acid sequence represented by SEQ ID NO: 1, encoding the polypeptide sequence of SEQ ID NO: 2. However, performance of the invention is not restricted to these sequences; the methods of the invention may advantageously be performed using any HSFA4- or a HSFA5-encoding nucleic acid or a HSFA4 or a HSFA5 polypeptide as defined herein.

[0222] Examples of nucleic acids encoding a HSFA4 or a HSFA5 polypeptide are given in Table A1 of the Examples section herein. Such nucleic acids are useful in performing the methods of the invention. The amino acid sequences given in Table A1 of the Examples section are example sequences of orthologues and paralogues of the HSFA4 polypeptide represented by any one of SEQ ID NO: 20, 22, 24, 26, 28, 30, 32, 34, 36, 38, 40, 42, 44, 46 or of the HSFA5 polypeptide represented by any one of SEQ ID NO: 2, 4, 6, 8, 10, 12, 14, 16 and 18, the terms “orthologues” and “paralogues” being as defined herein. Further orthologues and paralogues may readily be identified by performing a so-called reciprocal blast search. Typically, this involves a first BLAST involving BLASTing a query sequence (for example using any of the sequences listed in Table A1 of the Examples section) against any sequence database, such as the publicly available NCBI database. BLASTN or TBLASTX (using standard default values) are generally used when starting from a nucleotide sequence, and BLASTP or TBLASTN (using standard default values) when starting from a protein sequence. The BLAST results may optionally be filtered. The full-length sequences of either the filtered results or non-filtered results are then BLASTed back (second BLAST) against sequences from the organism from which the query sequence is derived (where the query sequence is SEQ ID NO: 1 or SEQ ID NO: 2, the second BLAST would therefore be against Medicago truncatula). The results of the first and second BLASTs are then compared. A paralogue is identified if a high-ranking hit from the first blast is from the same species as from which the query sequence is derived, a BLAST back then ideally results in the query sequence amongst the highest hits; an orthologue is identified if a high-ranking hit in the first BLAST is not from the same species as from which the query sequence is derived, and preferably results upon BLAST back in the query sequence being among the highest hits.

[0223] Concerning OPT4-like polypeptides, the present invention is illustrated by transforming plants with the nucleic acid sequence represented by SEQ ID NO: 155, encoding the polypeptide sequence of SEQ ID NO: 156. However, performance of the invention is not restricted to these sequences; the methods of the invention may advantageously be performed using any OPT4-like-encoding nucleic acid or OPT4-like polypeptide as defined herein.

[0224] Examples of nucleic acids encoding OPT4-like polypeptides are given in Table A2 of the Examples section herein. Such nucleic acids are useful in performing the methods of the invention. The amino acid sequences given in Table A2 of the Examples section are example sequences of orthologues and paralogues of the OPT4-like polypeptide represented by SEQ ID NO: 156, the terms “orthologues” and “paralogues” being as defined herein. Further orthologues and paralogues may readily be identified by performing a so-called reciprocal blast search. Typically, this involves a first BLAST involving BLASTing a query sequence (for example using any of the sequences listed in Table A2 of the Examples section) against any sequence database, such as the publicly available NCBI database. BLASTN or TBLASTX (using standard default values) are generally used when starting from a nucleotide sequence, and BLASTP or TBLASTN (using standard default values) when starting from a protein sequence. The BLAST results may optionally be filtered. The full-length sequences of either the filtered results or non-filtered results are then BLASTed back (second BLAST) against sequences from the organism from which the query sequence is derived (where the query sequence is SEQ ID NO: 155 or SEQ ID NO: 156, the second BLAST would therefore be against Arabidopsis sequences). The results of the first and second BLASTs are then compared. A paralogue is identified if a high-ranking hit from the first blast is from the same species as from which the query sequence is derived, a BLAST back then ideally results in the query sequence amongst the highest hits; an orthologue is identified if a high-ranking hit in the first BLAST is not from the same species as from which the query sequence is derived, and preferably results upon BLAST back in the query sequence being among the highest hits.

[0225] Concerning PLA2-like polypeptides, the present invention is illustrated by transforming plants with the nucleic acid sequence represented by SEQ ID NO: 252, encoding the polypeptide sequence of SEQ ID NO: 253. However, performance of the invention is not restricted to these sequences; the methods of the invention may advantageously be performed using any PLA2-like-encoding nucleic acid or PLA2-like polypeptide as defined herein.

[0226] Examples of nucleic acids encoding PLA2-like polypeptides are given in Table A3 of the Examples section herein. Such nucleic acids are useful in performing the methods of the invention. The amino acid sequences given in Table A3 of the Examples section are example sequences of orthologues and paralogues of the PLA2-like polypeptide represented by SEQ ID NO: 253, the terms “orthologues” and “paralogues” being as defined herein. Further orthologues and paralogues may readily be identified by performing a so-called reciprocal blast search. Typically, this involves a first BLAST involving BLASTing a query sequence (for example using any of the sequences listed in Table A3 of the Examples section) against any sequence database, such as the publicly available NCBI database. BLASTN or TBLASTX (using standard default values) are generally used when starting from a nucleotide sequence, and BLASTP or TBLASTN (using standard default values) when starting from a protein sequence. The BLAST results may optionally be filtered. The full-length sequences of either the filtered results or non-filtered results are then BLASTed back (second BLAST) against sequences from the organism from which the query sequence is derived (where the query sequence is SEQ ID NO: 252 or SEQ ID NO: 253, the second BLAST would therefore be against poplar sequences). The results of the first and second BLASTs are then compared. A paralogue is identified if a high-ranking hit from the first blast is from the same species as from which the query sequence is derived, a BLAST back then ideally results in the query sequence amongst the highest hits; an orthologue is identified if a high-ranking hit in the first BLAST is not from the same species as from which the query sequence is derived, and preferably results upon BLAST back in the query sequence being among the highest hits.

[0227] Concerning WOX1-like polypeptides, the present invention is illustrated by transforming plants with the nucleic acid sequence represented by SEQ ID NO: 373, encoding the polypeptide sequence of SEQ ID NO: 374. However, performance of the invention is not restricted to these sequences; the methods of the invention may advantageously be performed using any WOX1-like-encoding nucleic acid or WOX1-like polypeptide as defined herein.

[0228] Examples of nucleic acids encoding WOX1-like polypeptides are given in Table A4 of the Examples section herein. Such nucleic acids are useful in performing the methods of the invention. The amino acid sequences given in Table A4 of the Examples section are example sequences of orthologues and paralogues of the WOX1-like polypeptide represented by SEQ ID NO: 374, the terms “orthologues” and “paralogues” being as defined herein. Further orthologues and paralogues may readily be identified by performing a so-called reciprocal blast search. Typically, this involves a first BLAST involving BLASTing a query sequence (for example using any of the sequences listed in Table A4 of the Examples section) against any sequence database, such as the publicly available NCBI database. BLASTN or TBLASTX (using standard default values) are generally used when starting from a nucleotide sequence, and BLASTP or TBLASTN (using standard default values) when starting from a protein sequence. The BLAST results may optionally be filtered. The full-length sequences of either the filtered results or non-filtered results are then BLASTed back (second BLAST) against sequences from the organism from which the query sequence is derived (where the query sequence is SEQ ID NO: 373 or SEQ ID NO: 374, the second BLAST would therefore be against poplar sequences). The results of the first and second BLASTs are then compared. A paralogue is identified if a high-ranking hit from the first blast is from the same species as from which the query sequence is derived, a BLAST back then ideally results in the query sequence amongst the highest hits; an orthologue is identified if a high-ranking hit in the first BLAST is not from the same species as from which the query sequence is derived, and preferably results upon BLAST back in the query sequence being among the highest hits.

[0229] High-ranking hits are those having a low E-value. The lower the E-value, the more significant the score (or in other words the lower the chance that the hit was found by chance). Computation of the E-value is well known in the art. In addition to E-values, comparisons are also scored by percentage identity. Percentage identity refers to the number of identical nucleotides (or amino acids) between the two compared nucleic acid (or polypeptide) sequences over a particular length. In the case of large families, ClustalW may be used, followed by a neighbour joining tree, to help visualize clustering of related genes and to identify orthologues and paralogues.

[0230] The task of protein subcellular localisation prediction is important and well studied. Knowing a protein's localisation helps elucidate its function. Experimental methods for protein localization range from immunolocalization to tagging of proteins using green fluorescent protein (GFP) or beta-glucuronidase (GUS). Such methods are accurate although labor-intensive compared with computational methods. Recently much progress has been made in computational prediction of protein localisation from sequence data. Among algorithms well known to a person skilled in the art are available at the ExPASy Proteomics tools hosted by the Swiss Institute for Bioinformatics, for example, PSort, TargetP, ChloroP, LocTree, Predotar, LipoP, MITOPROT, PATS, PTS1, SignalP, TMHMM, and others.

[0231] Nucleic acid variants may also be useful in practising the methods of the invention. Examples of such variants include nucleic acids encoding homologues and derivatives of any one of the amino acid sequences given in Table A1 to A4 of the Examples section, the terms “homologue” and “derivative” being as defined herein. Also useful in the methods of the invention are nucleic acids encoding homologues and derivatives of orthologues or paralogues of any one of the amino acid sequences given in Table A1 to A4 of the Examples section. Homologues and derivatives useful in the methods of the present invention have substantially the same biological and functional activity as the unmodified protein from which they are derived.

[0232] Further nucleic acid variants useful in practising the methods of the invention include portions of nucleic acids encoding HSFA4 or HSFA5 polypeptides, or OPT4-like polypeptides, or PLA2-like polypeptides, or WOX1-like polypeptides, nucleic acids hybridising to nucleic acids encoding HSFA4 or HSFA5 polypeptides, or OPT4-like polypeptides, or PLA2-like polypeptides, or WOX1-like polypeptides, splice variants of nucleic acids encoding HSFA4 or HSFA5 polypeptides, or OPT4-like polypeptides, or PLA2-like polypeptides, or WOX1-like polypeptides, allelic variants of nucleic acids encoding HSFA4 or HSFA5 polypeptides, or OPT4-like polypeptides, or PLA2-like polypeptides, or WOX1-like polypeptides, and variants of nucleic acids encoding HSFA4 or HSFA5 polypeptides, or OPT4-like polypeptides, or PLA2-like polypeptides, or WOX1-like polypeptides, obtained by gene shuffling. The terms hybridising sequence, splice variant, allelic variant and gene shuffling are as described herein.

[0233] Nucleic acids encoding a HSFA4 or a HSFA5 polypeptide, or an OPT4-like polypeptide, or a PLA2-like polypeptide, or a WOX1-like polypeptide, need not be full-length nucleic acids, since performance of the methods of the invention does not rely on the use of full-length nucleic acid sequences. According to the present invention, there is provided a method for enhancing yield-related traits in plants, comprising introducing and expressing in a plant a portion of any one of the nucleic acid sequences given in Table A1 to A4 of the Examples section, or a portion of a nucleic acid encoding an orthologue, paralogue or homologue of any of the amino acid sequences given in Table A1 to A4 of the Examples section.

[0234] A portion of a nucleic acid may be prepared, for example, by making one or more deletions to the nucleic acid. The portions may be used in isolated form or they may be fused to other coding (or non-coding) sequences in order to, for example, produce a protein that combines several activities. When fused to other coding sequences, the resultant polypeptide produced upon translation may be bigger than that predicted for the protein portion.

[0235] Concerning HSF polypeptides, portions useful in the methods of the invention, encode a HSFA4 or a HSFA5 polypeptide as defined herein, and have substantially the same biological activity as the amino acid sequences given in Table A1 of the Examples section. Preferably, the portion is a portion of any one of the nucleic acids given in Table A1 of the Examples section, or is a portion of a nucleic acid encoding an orthologue or paralogue of any one of the amino acid sequences given in Table A1 of the Examples section. Preferably the portion is at least 15, 30, 50, 100, 200, 300, 400, 500, 550, 600, 650, 700, 750, 800, 850, 900, 950, 1000 consecutive nucleotides in length, the consecutive nucleotides being of any one of the nucleic acid sequences given in Table A1 of the Examples section, or of a nucleic acid encoding an orthologue or paralogue of any one of the amino acid sequences given in Table A1 of the Examples section. Most preferably the portion is a portion of any one of the nucleic acids represented by SEQ ID NO: 1, SEQ ID NO: 23, 35 and 37. Preferably, the portion encodes a fragment of an amino acid sequence which, when used in the construction of a phylogenetic tree of Arabidopsis tomato and rice HSFs, such as the one described in Koskill-Doring et al. 2007 and depicted in FIG. 2, clusters within the A4 clade defined by AtA4a, AtA4b, AtA4c, OsA4b, OsA4d, and LeA4b polypeptides for portions of HSFA4 polypeptides or with the A5 clade defined by AtA5 and LeA5 and OsA5 polypeptides for portions of HSFA5 polypeptides.

[0236] Concerning OPT4-like polypeptides, portions useful in the methods of the invention, encode an OPT4-like polypeptide as defined herein, and have substantially the same biological activity as the amino acid sequences given in Table A2 of the Examples section. Preferably, the portion is a portion of any one of the nucleic acids given in Table A2 of the Examples section, or is a portion of a nucleic acid encoding an orthologue or paralogue of any one of the amino acid sequences given in Table A2 of the Examples section. Preferably the portion is at least 1500, 1600, 1700, 1800, 1900, 2000, 2100, 2200, 2300, 2400, 2500, 2600, 2700, 2800 or more consecutive nucleotides in length, the consecutive nucleotides being of any one of the nucleic acid sequences given in Table A2 of the Examples section, or of a nucleic acid encoding an orthologue or paralogue of any one of the amino acid sequences given in Table A2 of the Examples section. Most preferably the portion is a portion of the nucleic acid of SEQ ID NO: 155. Preferably, the portion encodes a fragment of an amino acid sequence which when used in the construction of a phylogenetic tree, such as the one depicted in FIG. 5, clusters with the group of OPT4-like polypeptides defined by Clade I, II, III or IV, most preferably to the Clade comprising the amino acid sequence represented by SEQ ID NO: 156.

[0237] Concerning PLA2-like polypeptides, portions useful in the methods of the invention, encode a PLA2-like polypeptide as defined herein, and have substantially the same biological activity as the amino acid sequences given in Table A3 of the Examples section. Preferably, the portion is a portion of any one of the nucleic acids given in Table A3 of the Examples section, or is a portion of a nucleic acid encoding an orthologue or paralogue of any one of the amino acid sequences given in Table A3 of the Examples section. Preferably the portion is at least 2500, 2750, 3000, 3250, 3500, 3750, 4000, 4250, 4500, 4750 consecutive nucleotides in length, the consecutive nucleotides being of any one of the nucleic acid sequences given in Table A3 of the Examples section, or of a nucleic acid encoding an orthologue or paralogue of any one of the amino acid sequences given in Table A3 of the Examples section. Most preferably the portion is a portion of the nucleic acid of SEQ ID NO: 252. Preferably, the portion encodes a fragment of an amino acid sequence which, when used in the construction of a phylogenetic tree, such as the one depicted in FIG. 8, clusters with the sequences of Clade C or Clade D, and preferably with PLA2 Clade or PLA2b Clade, most preferably clustering with the amino acid sequence represented by SEQ ID NO: 253.

[0238] Concerning WOX1-like polypeptides, portions useful in the methods of the invention, encode a WOX1-like polypeptide as defined herein, and have substantially the same biological activity as the amino acid sequences given in Table A4 of the Examples section. Preferably, the portion is a portion of any one of the nucleic acids given in Table A4 of the Examples section, or is a portion of a nucleic acid encoding an orthologue or paralogue of any one of the amino acid sequences given in Table A of the Examples section. Preferably the portion is at least 1000, 1100, 1200, 1300, 1400, 1500, 1600, 1700, 1800 consecutive nucleotides in length, the consecutive nucleotides being of any one of the nucleic acid sequences given in Table A4 of the Examples section, or of a nucleic acid encoding an orthologue or paralogue of any one of the amino acid sequences given in Table A4 of the Examples section. Most preferably the portion is a portion of the nucleic acid of SEQ ID NO: 373. Preferably, the portion encodes a fragment of an amino acid sequence which, when used in the construction of a phylogenetic tree, such as the one depicted in FIG. 11, clusters with the group of WOX1-like polypeptides comprising the amino acid sequence represented by SEQ ID NO: 374 rather than with any other group.

[0239] Another nucleic acid variant useful in the methods of the invention is a nucleic acid capable of hybridising, under reduced stringency conditions, preferably under stringent conditions, with a nucleic acid encoding a HSFA4 or a HSFA5 polypeptide, or an OPT4-like polypeptide, or a PLA2-like polypeptide, or a WOX1-like polypeptide, as defined herein, or with a portion as defined herein.

[0240] According to the present invention, there is provided a method for enhancing yield-related traits in plants, comprising introducing and expressing in a plant a nucleic acid capable of hybridizing to any one of the nucleic acids given in Table A1 to A4 of the Examples section, or comprising introducing and expressing in a plant a nucleic acid capable of hybridising to a nucleic acid encoding an orthologue, paralogue or homologue of any of the nucleic acid sequences given in Table A1 to A4 of the Examples section.

[0241] Concerning HSF polypeptides, hybridising sequences useful in the methods of the invention encode a HSFA4 or a HSFA5 polypeptide as defined herein, having substantially the same biological activity as the amino acid sequences given in Table A1 of the Examples section. Preferably, the hybridising sequence is capable of hybridising to the complement of any one of the nucleic acids given in Table A1 of the Examples section, or to a portion of any of these sequences, a portion being as defined above, or the hybridising sequence is capable of hybridising to the complement of a nucleic acid encoding an orthologue or paralogue of any one of the amino acid sequences given in Table A1 of the Examples section. Most preferably, the hybridising sequence is capable of hybridising to the complement of a nucleic acid as represented by SEQ ID NO: 1 or to a portion thereof.

[0242] Preferably, the hybridising sequence encodes a polypeptide with an amino acid sequence which, when full-length and used in the construction of a phylogenetic tree of Arabidopsis tomato and rice HSFs, such as the one described in Koskill-Doring et al. 2007 and depicted in FIG. 2, clusters within the A4 clade defined by AtA4a, AtA4b, AtA4c, OsA4b, OsA4d, and LeA4b polypeptides for sequences of HSFA4 polypeptides or with the A5 clade defined by AtA5, OsA5 and LeA5 polypeptides for sequences of HSFA5 polypeptides.

[0243] Concerning OPT4-like polypeptides, hybridising sequences useful in the methods of the invention encode an OPT4-like polypeptide as defined herein, having substantially the same biological activity as the amino acid sequences given in Table A2 of the Examples section. Preferably, the hybridising sequence is capable of hybridising to the complement of any one of the nucleic acids given in Table A2 of the Examples section, or to a portion of any of these sequences, a portion being as defined above, or the hybridising sequence is capable of hybridising to the complement of a nucleic acid encoding an orthologue or paralogue of any one of the amino acid sequences given in Table A2 of the Examples section. Most preferably, the hybridising sequence is capable of hybridising to the complement of a nucleic acid as represented by SEQ ID NO: 155 or to a portion thereof.

[0244] Preferably, the hybridising sequence encodes a fragment of an amino acid sequence which when used in the construction of a phylogenetic tree, such as the one depicted in FIG. 5, clusters with the group of OPT4-like polypeptides defined by Clade I, II, III or IV, most preferably to the Clade comprising the amino acid sequence represented by SEQ ID NO: 156.

[0245] Concerning PLA2-like polypeptides, hybridising sequences useful in the methods of the invention encode a PLA2-like polypeptide as defined herein, having substantially the same biological activity as the amino acid sequences given in Table A3 of the Examples section. Preferably, the hybridising sequence is capable of hybridising to the complement of any one of the nucleic acids given in Table A3 of the Examples section, or to a portion of any of these sequences, a portion being as defined above, or the hybridising sequence is capable of hybridising to the complement of a nucleic acid encoding an orthologue or paralogue of any one of the amino acid sequences given in Table A3 of the Examples section. Most preferably, the hybridising sequence is capable of hybridising to the complement of a nucleic acid as represented by SEQ ID NO: 252 or to a portion thereof.

[0246] Preferably, the hybridising sequence encodes a polypeptide with an amino acid sequence which, when full-length and used in the construction of a phylogenetic tree, such as the one depicted in FIG. 8, clusters with the sequences of Clade C or Clade D, and preferably with PLA2 Clade or PLA2b Clade, most preferably clustering with the amino acid sequence represented by SEQ ID NO: 253.

[0247] Concerning WOX1-like polypeptides, hybridising sequences useful in the methods of the invention encode a WOX1-like polypeptide as defined herein, having substantially the same biological activity as the amino acid sequences given in Table A4 of the Examples section. Preferably, the hybridising sequence is capable of hybridising to the complement of any one of the nucleic acids given in Table A4 of the Examples section, or to a portion of any of these sequences, a portion being as defined above, or the hybridising sequence is capable of hybridising to the complement of a nucleic acid encoding an orthologue or paralogue of any one of the amino acid sequences given in Table A4 of the Examples section. Most preferably, the hybridising sequence is capable of hybridising to the complement of a nucleic acid as represented by SEQ ID NO: 373 or to a portion thereof.

[0248] Preferably, the hybridising sequence encodes a polypeptide with an amino acid sequence which, when full-length and used in the construction of a phylogenetic tree, such as the one depicted in FIG. 11, clusters with the group of WOX1-like polypeptides comprising the amino acid sequence represented by SEQ ID NO: 374 rather than with any other group.

[0249] Another nucleic acid variant useful in the methods of the invention is a splice variant encoding a HSFA4 or a HSFA5 polypeptide, or an OPT4-like polypeptide, or a PLA2-like polypeptide, or a WOX1-like polypeptide, as defined hereinabove, a splice variant being as defined herein.

[0250] According to the present invention, there is provided a method for enhancing yield-related traits in plants, comprising introducing and expressing in a plant a splice variant of any one of the nucleic acid sequences given in Table A1 to A4 of the Examples section, or a splice variant of a nucleic acid encoding an orthologue, paralogue or homologue of any of the amino acid sequences given in Table A1 to A4 of the Examples section.

[0251] Concerning HSF polypeptides, preferred splice variants are splice variants of a nucleic acid represented by SEQ ID NO: 1, or a splice variant of a nucleic acid encoding an orthologue or paralogue of SEQ ID NO: 2. Preferably, the amino acid sequence encoded by the splice variant, when used in the construction of a phylogenetic tree of Arabidopsis tomato and rice HSFs, such as the one described in Koskill-Doring et al. 2007 and depicted in FIG. 2, clusters within the A4 clade defined by AtA4a, AtA4b, AtA4c, OsA4b, OsA4d, and LeA4b polypeptides for sequences of HSFA4 polypeptides or with the A5 clade defined by AtA5, OsA5 and LeA5 polypeptides for sequences of HSFA5 polypeptides.

[0252] Concerning OPT4-like polypeptides, preferred splice variants are splice variants of a nucleic acid represented by SEQ ID NO: 155, or a splice variant of a nucleic acid encoding an orthologue or paralogue of SEQ ID NO: 156. Preferably, the amino acid sequence encoded by the splice variant, when used in the construction of a phylogenetic tree, such as the one depicted in FIG. 5, clusters with the group of OPT4-like polypeptides defined by Clade I, II, III or IV, most preferably to the Clade comprising the amino acid sequence represented by SEQ ID NO: 156.

[0253] Concerning PLA2-like polypeptides, preferred splice variants are splice variants of a nucleic acid represented by SEQ ID NO: 252, or a splice variant of a nucleic acid encoding an orthologue or paralogue of SEQ ID NO: 253. Preferably, the amino acid sequence encoded by the splice variant, when used in the construction of a phylogenetic tree, such as the one depicted in FIG. 8, clusters with the sequences of Clade C or Clade D, and preferably with PLA2 Clade or PLA2b Clade, most preferably clustering with the amino acid sequence represented by SEQ ID NO: 253.

[0254] Concerning WOX1-like polypeptides, preferred splice variants are splice variants of a nucleic acid represented by SEQ ID NO: 373, or a splice variant of a nucleic acid encoding an orthologue or paralogue of SEQ ID NO: 374. Preferably, the amino acid sequence encoded by the splice variant, when used in the construction of a phylogenetic tree, such as the one depicted in FIG. 11, clusters with the group of WOX1-like polypeptides comprising the amino acid sequence represented by SEQ ID NO: 374 rather than with any other group.

[0255] Another nucleic acid variant useful in performing the methods of the invention is an allelic variant of a nucleic acid encoding a HSFA4 or a HSFA5 polypeptide, or an OPT4-like polypeptide, or a PLA2-like polypeptide, or a WOX1-like polypeptide, as defined hereinabove, an allelic variant being as defined herein.

[0256] According to the present invention, there is provided a method for enhancing yield-related traits in plants, comprising introducing and expressing in a plant an allelic variant of any one of the nucleic acids given in Table A1 to A4 of the Examples section, or comprising introducing and expressing in a plant an allelic variant of a nucleic acid encoding an orthologue, paralogue or homologue of any of the amino acid sequences given in Table A1 to A4 of the Examples section.

[0257] Concerning HSF polypeptides, the polypeptides encoded by allelic variants useful in the methods of the present invention have substantially the same biological activity as the HSF polypeptide of SEQ ID NO: 2 and any of the amino acids depicted in Table A1 of the Examples section. Allelic variants exist in nature, and encompassed within the methods of the present invention is the use of these natural alleles. Preferably, the allelic variant is an allelic variant of SEQ ID NO: 1 or an allelic variant of a nucleic acid encoding an orthologue or paralogue of SEQ ID NO: 2. Preferably, the amino acid sequence encoded by the allelic variant, when used in the construction of a phylogenetic tree of Arabidopsis tomato and rice HSFs, such as the one described in Koskill-Doring et al. 2007 and depicted in FIG. 2, clusters within the A4 clade defined by AtA4a, AtA4b, AtA4c, OsA4b, OsA4d, and LeA4b polypeptides for sequences of HSFA4 polypeptides or with the A5 clade defined by AtA5, OsA5 and LeA5 polypeptides for sequences of HSFA5 polypeptides.

[0258] Concerning OPT4-like polypeptides, the polypeptides encoded by allelic variants useful in the methods of the present invention have substantially the same biological activity as the OPT4-like polypeptide of SEQ ID NO: 156 and any of the amino acids depicted in Table A2 of the Examples section. Allelic variants exist in nature, and encompassed within the methods of the present invention is the use of these natural alleles. Preferably, the allelic variant is an allelic variant of SEQ ID NO: 155 or an allelic variant of a nucleic acid encoding an orthologue or paralogue of SEQ ID NO: 156. Preferably, the amino acid sequence encoded by the allelic variant, when used in the construction of a phylogenetic tree, such as the one depicted in FIG. 5, clusters with the group of OPT4-like polypeptides defined by Clade I, II, III or IV, most preferably to the Clade comprising the amino acid sequence represented by SEQ ID NO: 156.

[0259] Concerning PLA2-like polypeptides, the polypeptides encoded by allelic variants useful in the methods of the present invention have substantially the same biological activity as the PLA2-like polypeptide of SEQ ID NO: 253 and any of the amino acids depicted in Table A3 of the Examples section. Allelic variants exist in nature, and encompassed within the methods of the present invention is the use of these natural alleles. Preferably, the allelic variant is an allelic variant of SEQ ID NO: 252 or an allelic variant of a nucleic acid encoding an orthologue or paralogue of SEQ ID NO: 253. Preferably, the amino acid sequence encoded by the allelic variant, when used in the construction of a phylogenetic tree, such as the one depicted in FIG. 8, clusters with the sequences of Clade C or Clade D, and preferably with PLA2 Clade or PLA2b Clade, most preferably clustering with the amino acid sequence represented by SEQ ID NO: 253.

[0260] Concerning WOX1-like polypeptides, the polypeptides encoded by allelic variants useful in the methods of the present invention have substantially the same biological activity as the WOX1-like polypeptide of SEQ ID NO: 374 and any of the amino acids depicted in Table A4 of the Examples section. Allelic variants exist in nature, and encompassed within the methods of the present invention is the use of these natural alleles. Preferably, the allelic variant is an allelic variant of SEQ ID NO: 373 or an allelic variant of a nucleic acid encoding an orthologue or paralogue of SEQ ID NO: 374. Preferably, the amino acid sequence encoded by the allelic variant, when used in the construction of a phylogenetic tree, such as the one depicted in FIG. 11, clusters with the WOX1-like polypeptides comprising the amino acid sequence represented by SEQ ID NO: 374 rather than with any other group.

[0261] Gene shuffling or directed evolution may also be used to generate variants of nucleic acids encoding HSFA4 or HSFA5 polypeptides, or OPT4-like polypeptides, or PLA2-like polypeptides, or WOX1-like polypeptides, as defined above; the term “gene shuffling” being as defined herein.

[0262] According to the present invention, there is provided a method for enhancing yield-related traits in plants, comprising introducing and expressing in a plant a variant of any one of the nucleic acid sequences given in Table A1 to A4 of the Examples section, or comprising introducing and expressing in a plant a variant of a nucleic acid encoding an orthologue, paralogue or homologue of any of the amino acid sequences given in Table A1 to A4 of the Examples section, which variant nucleic acid is obtained by gene shuffling.

[0263] Concerning HSF polypeptides, preferably, the amino acid sequence encoded by the variant nucleic acid obtained by gene shuffling, when used in the construction of a phylogenetic tree of Arabidopsis tomato and rice HSFs, such as the one described in FIG. 2 of Koskill-Doring et al. 2007 and depicted in FIG. 2, clusters within the A4 clade defined by AtA4a, AtA4b, AtA4c, OsA4b, OsA4d, and LeA4b polypeptides for sequences of HSFA4 polypeptides or with the A5 clade defined by AtA5, OsA5 and LeA5 polypeptides for sequences of HSFA5 polypeptides.

[0264] Concerning OPT4-like polypeptides, preferably, the amino acid sequence encoded by the variant nucleic acid obtained by gene shuffling, when used in the construction of a phylogenetic tree such as the one depicted FIG. 5, clusters with the group of OPT4-like polypeptides defined by Clade I, II, III or IV, most preferably to the Clade comprising the amino acid sequence represented by SEQ ID NO: 156.

[0265] Concerning PLA2-like polypeptides, preferably, the amino acid sequence encoded by the variant nucleic acid obtained by gene shuffling, when used in the construction of a phylogenetic tree such as the one depicted in FIG. 8, clusters with the sequences of Clade C or Clade D, and preferably with PLA2 Clade or PLA2b Clade, most preferably clustering with the amino acid sequence represented by SEQ ID NO: 253.

[0266] Concerning WOX1-like polypeptides, preferably, the amino acid sequence encoded by the variant nucleic acid obtained by gene shuffling, when used in the construction of a phylogenetic tree such as the one depicted in FIG. 11, clusters with the group of WOX1-like polypeptides comprising the amino acid sequence represented by SEQ ID NO: 374 rather than with any other group.

[0267] Furthermore, nucleic acid variants may also be obtained by site-directed mutagenesis. Several methods are available to achieve site-directed mutagenesis, the most common being PCR based methods (Current Protocols in Molecular Biology. Wiley Eds.).

[0268] Nucleic acids encoding a HSFA4 or a HSFA5 polypeptides may be derived from any natural or artificial source. The nucleic acid may be modified from its native form in composition and/or genomic environment through deliberate human manipulation. Preferably the HSFA5 polypeptide-encoding nucleic acid is from a plant, further preferably from a dicotyledonous plant, more preferably from a legume, most preferably from Medicago truncatula. Preferably the HSFA4 polypeptide-encoding nucleic acid is from a plant, more preferably from a plant of the same genus or family as that in which the methods of the invention are performed. Thus fore example where the enhanced yield-related traits is effected in rice plants the HSFA4 polypeptide-encoding nucleic acid is the preferably from monocotyledonous plant, more preferably from the family Poaceae, most preferably the nucleic acid is from Oryza sativa.

[0269] Nucleic acids encoding OPT4-like polypeptides may be derived from any natural or artificial source. The nucleic acid may be modified from its native form in composition and/or genomic environment through deliberate human manipulation. Preferably the OPT4-like polypeptide-encoding nucleic acid is from a plant, further preferably from a dicotyledonous plant, more preferably from the family Brassicaceae, most preferably the nucleic acid is from Arabidopsis thaliana.

[0270] Nucleic acids encoding PLA2-like polypeptides may be derived from any natural or artificial source. The nucleic acid may be modified from its native form in composition and/or genomic environment through deliberate human manipulation. Preferably the PLA2-like polypeptide-encoding nucleic acid is from a plant, further preferably from a monocotyledonous plant, more preferably from the family Poplar, most preferably the nucleic acid is from Populus trichocarpa.

[0271] Nucleic acids encoding WOX1-like polypeptides may be derived from any natural or artificial source. The nucleic acid may be modified from its native form in composition and/or genomic environment through deliberate human manipulation. Preferably the WOX1-like polypeptide-encoding nucleic acid is from a plant, further preferably from a dicotyledonous plant, more preferably from the family Populus, most preferably the nucleic acid is from Populus trichocarpa.

[0272] Performance of the methods of the invention gives plants having enhanced yield-related traits. In particular performance of the methods of the invention gives plants having increased yield, especially increased seed yield relative to control plants. The terms “yield” and “seed yield” are described in more detail in the “definitions” section herein.

[0273] Reference herein to enhanced yield-related traits is taken to mean an increase in biomass (weight) of one or more parts of a plant, which may include aboveground (harvestable) parts and/or (harvestable) parts below ground. In particular, such harvestable parts are seeds, and performance of the methods of the invention results in plants having increased seed yield relative to the seed yield of control plants.

[0274] Taking corn as an example, a yield increase may be manifested as one or more of the following: increase in the number of plants established per square meter, an increase in the number of ears per plant, an increase in the number of rows, number of kernels per row, kernel weight, thousand kernel weight, ear length/diameter, increase in the seed filling rate (which is the number of filled seeds divided by the total number of seeds and multiplied by 100), among others. Taking rice as an example, a yield increase may manifest itself as an increase in one or more of the following: number of plants per square meter, number of panicles per plant, number of spikelets per panicle, number of flowers (florets) per panicle (which is expressed as a ratio of the number of filled seeds over the number of primary panicles), increase in the seed filling rate (which is the number of filled seeds divided by the total number of seeds and multiplied by 100), increase in thousand kernel weight, among others.

[0275] The present invention provides a method for increasing yield, especially seed yield of plants, relative to control plants, which method comprises modulating expression in a plant of a nucleic acid encoding a HSFA4 or a HSFA5 polypeptide, or an OPT4-like polypeptide, or a PLA2-like polypeptide, or a WOX1-like polypeptide, as defined herein.

[0276] Since the transgenic plants according to the present invention have increased yield, it is likely that these plants exhibit an increased growth rate (during at least part of their life cycle), relative to the growth rate of control plants at a corresponding stage in their life cycle.

[0277] The increased growth rate may be specific to one or more parts of a plant (including seeds), or may be throughout substantially the whole plant. Plants having an increased growth rate may have a shorter life cycle. The life cycle of a plant may be taken to mean the time needed to grow from a dry mature seed up to the stage where the plant has produced dry mature seeds, similar to the starting material. This life cycle may be influenced by factors such as speed of germination, early vigour, growth rate, greenness index, flowering time and speed of seed maturation. The increase in growth rate may take place at one or more stages in the life cycle of a plant or during substantially the whole plant life cycle. Increased growth rate during the early stages in the life cycle of a plant may reflect enhanced vigour. The increase in growth rate may alter the harvest cycle of a plant allowing plants to be sown later and/or harvested sooner than would otherwise be possible (a similar effect may be obtained with earlier flowering time). If the growth rate is sufficiently increased, it may allow for the further sowing of seeds of the same plant species (for example sowing and harvesting of rice plants followed by sowing and harvesting of further rice plants all within one conventional growing period). Similarly, if the growth rate is sufficiently increased, it may allow for the further sowing of seeds of different plants species (for example the sowing and harvesting of corn plants followed by, for example, the sowing and optional harvesting of soybean, potato or any other suitable plant). Harvesting additional times from the same rootstock in the case of some crop plants may also be possible. Altering the harvest cycle of a plant may lead to an increase in annual biomass production per square meter (due to an increase in the number of times (say in a year) that any particular plant may be grown and harvested). An increase in growth rate may also allow for the cultivation of transgenic plants in a wider geographical area than their wild-type counterparts, since the territorial limitations for growing a crop are often determined by adverse environmental conditions either at the time of planting (early season) or at the time of harvesting (late season). Such adverse conditions may be avoided if the harvest cycle is shortened. The growth rate may be determined by deriving various parameters from growth curves, such parameters may be: T-Mid (the time taken for plants to reach 50% of their maximal size) and T-90 (time taken for plants to reach 90% of their maximal size), amongst others.

[0278] According to a preferred feature of the present invention, performance of the methods of the invention gives plants having an increased growth rate relative to control plants. Therefore, according to the present invention, there is provided a method for increasing the growth rate of plants, which method comprises modulating expression in a plant of a nucleic acid encoding a HSFA4 or a HSFA5 polypeptide, or an OPT4-like polypeptide, or a PLA2-like polypeptide, or a WOX1-like polypeptide, as defined herein.

[0279] An increase in yield and/or growth rate occurs whether the plant is under non-stress conditions or whether the plant is exposed to various stresses compared to control plants. Plants typically respond to exposure to stress by growing more slowly. In conditions of severe stress, the plant may even stop growing altogether. Mild stress on the other hand is defined herein as being any stress to which a plant is exposed which does not result in the plant ceasing to grow altogether without the capacity to resume growth. Mild stress in the sense of the invention leads to a reduction in the growth of the stressed plants of less than 40%, 35%, 30% or 25%, more preferably less than 20% or 15% in comparison to the control plant under non-stress conditions. Due to advances in agricultural practices (irrigation, fertilization, pesticide treatments) severe stresses are not often encountered in cultivated crop plants. As a consequence, the compromised growth induced by mild stress is often an undesirable feature for agriculture. Mild stresses are the everyday biotic and/or abiotic (environmental) stresses to which a plant is exposed. Abiotic stresses may be due to drought or excess water, anaerobic stress, salt stress, chemical toxicity, oxidative stress and hot, cold or freezing temperatures. The abiotic stress may be an osmotic stress caused by a water stress (particularly due to drought), salt stress, oxidative stress or an ionic stress. Biotic stresses are typically those stresses caused by pathogens, such as bacteria, viruses, fungi, nematodes and insects. Biotic stresses are typically those stresses caused by pathogens, such as bacteria, viruses, fungi, nematodes, and insects. The term “non-stress” conditions as used herein are those environmental conditions that allow optimal growth of plants. Persons skilled in the art are aware of normal soil conditions and climatic conditions for a given location. The term non-stress conditions as used herein, encompasses the occasional or everyday mild stresses to which a plant is exposed, as defined herein, but does not encompass severe stresses.

[0280] In particular, the methods of the present invention may be performed under non-stress conditions or under conditions of mild drought to give plants having increased yield relative to control plants. As reported in Wang et al. (Planta (2003) 218: 1-14), abiotic stress leads to a series of morphological, physiological, biochemical and molecular changes that adversely affect plant growth and productivity. Drought, salinity, extreme temperatures and oxidative stress are known to be interconnected and may induce growth and cellular damage through similar mechanisms. Rabbani et al. (Plant Physiol (2003) 133: 1755-1767) describes a particularly high degree of “cross talk” between drought stress and high-salinity stress. For example, drought and/or salinisation are manifested primarily as osmotic stress, resulting in the disruption of homeostasis and ion distribution in the cell. Oxidative stress, which frequently accompanies high or low temperature, salinity or drought stress, may cause denaturing of functional and structural proteins. As a consequence, these diverse environmental stresses often activate similar cell signalling pathways and cellular responses, such as the production of stress proteins, up-regulation of anti-oxidants, accumulation of compatible solutes and growth arrest. The term “non-stress” conditions as used herein are those environmental conditions that allow optimal growth of plants. Persons skilled in the art are aware of normal soil conditions and climatic conditions for a given location. Plants with optimal growth conditions, (grown under non-stress conditions) typically yield in increasing order of preference at least 97%, 95%, 92%, 90%, 87%, 85%, 83%, 80%, 77% or 75% of the average production of such plant in a given environment. Average production may be calculated on harvest and/or season basis. Persons skilled in the art are aware of average yield productions of a crop.

[0281] Performance of the methods of the invention gives plants grown under non-stress conditions or under mild drought conditions increased yield relative to control plants grown under comparable conditions. Therefore, according to the present invention, there is provided a method for increasing yield in plants grown under non-stress conditions or under mild drought conditions, which method comprises modulating expression in a plant of a nucleic acid encoding a HSFA4 or a HSFA5 polypeptide, or an OPT4-like polypeptide, or a PLA2-like polypeptide, or a WOX1-like polypeptide.

[0282] Performance of the methods of the invention gives plants grown under conditions of nutrient deficiency, particularly under conditions of nitrogen deficiency, increased yield relative to control plants grown under comparable conditions. Therefore, according to the present invention, there is provided a method for increasing yield in plants grown under conditions of nutrient deficiency, which method comprises modulating expression in a plant of a nucleic acid encoding a HSFA4 or a HSFA5 polypeptide, or an OPT4-like polypeptide, or a PLA2-like polypeptide, or a WOX1-like polypeptide. Nutrient deficiency may result from a lack of nutrients such as nitrogen, phosphates and other phosphorous-containing compounds, potassium, calcium, magnesium, manganese, iron and boron, amongst others.

[0283] Performance of the methods of the invention gives plants grown under conditions of salt stress, increased yield relative to control plants grown under comparable conditions. Therefore, according to the present invention, there is provided a method for increasing yield in plants grown under conditions of salt stress, which method comprises modulating expression in a plant of a nucleic acid encoding a HSFA4 or a HSFA5 polypeptide, or an OPT4-like polypeptide, or a PLA2-like polypeptide, or a WOX1-like polypeptide. The term salt stress is not restricted to common salt (NaCl), but may be any one or more of: NaCl, KCl, LiCl, MgCl₂, CaCl₂, amongst others.

[0284] The present invention encompasses plants or parts thereof (including seeds) obtainable by the methods according to the present invention. The plants or parts thereof comprise a nucleic acid transgene encoding a HSFA4 or a HSFA5 polypeptide, or an OPT4-like polypeptide, or a PLA2-like polypeptide, or a WOX1-like polypeptide, as defined above.

[0285] The invention also provides genetic constructs and vectors to facilitate introduction and/or expression in plants of nucleic acids encoding HSFA4 or HSFA5 polypeptides, or OPT4-like polypeptides, or PLA2-like polypeptides, or WOX1-like polypeptides. The gene constructs may be inserted into vectors, which may be commercially available, suitable for transforming into plants and suitable for expression of the gene of interest in the transformed cells. The invention also provides use of a gene construct as defined herein in the methods of the invention.

[0286] More specifically, the present invention provides a construct comprising:
[0287] (a) a nucleic acid encoding a HSFA4 or a HSFA5 polypeptide, or an OPT4-like polypeptide, or a PLA2-like polypeptide, or a WOX1-like polypeptide, as defined above;
[0288] (b) one or more control sequences capable of driving expression of the nucleic acid sequence of (a); and optionally
[0289] (c) a transcription termination sequence.

[0290] Preferably, the nucleic acid encoding a HSFA4 or a HSFA5 polypeptide, or an OPT4-like polypeptide, or a PLA2-like polypeptide, or a WOX1-like polypeptide, is as defined above. The term “control sequence” and “termination sequence” are as defined herein.

[0291] Plants are transformed with a vector comprising any of the nucleic acids described above. The skilled artisan is well aware of the genetic elements that must be present on the vector in order to successfully transform, select and propagate host cells containing the sequence of interest. The sequence of interest is operably linked to one or more control sequences (at least to a promoter).

[0292] Advantageously, any type of promoter, whether natural or synthetic, may be used to drive expression of the nucleic acid sequence, but preferably the promoter is of plant origin. A constitutive promoter is particularly useful in the methods. Preferably the constitutive promoter is also a ubiquitous promoter of medium strength. See the “Definitions” section herein for definitions of the various promoter types.

[0293] Concerning HSF polypeptides, it should be clear that the applicability of the present invention is not restricted to the HSF polypeptide-encoding nucleic acid represented by SEQ ID NO: 1, nor is the applicability of the invention restricted to expression of a HSFA4 or a HSFA5 polypeptide-encoding nucleic acid when driven by a constitutive promoter.

[0294] The constitutive promoter is preferably a medium strength promoter, more preferably selected from a plant derived promoter, such as a GOS2 promoter, more preferably is the promoter GOS2 promoter from rice. Further preferably the constitutive promoter is represented by a nucleic acid sequence substantially similar to SEQ ID NO: 154, most preferably the constitutive promoter is as represented by SEQ ID NO: 154. See the “Definitions” section herein for further examples of constitutive promoters.

[0295] Optionally, one or more terminator sequences may be used in the construct introduced into a plant. Preferably, the construct comprises an expression cassette comprising aGOS2 promoter, substantially similar to SEQ ID NO: 154, and the nucleic acid encoding the HSFA4 or the HSFA5 polypeptide.

[0296] Concerning OPT4-like polypeptides, it should be clear that the applicability of the present invention is not restricted to the OPT4-like polypeptide-encoding nucleic acid represented by SEQ ID NO: 155, nor is the applicability of the invention restricted to expression of an OPT4-like polypeptide-encoding nucleic acid when driven by a constitutive promoter.

[0297] The constitutive promoter is preferably a medium strength promoter, more preferably selected from a plant derived promoter, such as a GOS2 promoter, more preferably is the promoter GOS2 promoter from rice. Further preferably the constitutive promoter is represented by a nucleic acid sequence substantially similar to SEQ ID NO: 249, most preferably the constitutive promoter is as represented by SEQ ID NO: 249. See the “Definitions” section herein for further examples of constitutive promoters.

[0298] Optionally, one or more terminator sequences may be used in the construct introduced into a plant. Preferably, the construct comprises an expression cassette comprising a GOS2 promoter, substantially similar to SEQ ID NO: 249, and the nucleic acid encoding the OPT4-like polypeptide represented by SEQ ID NO: 155 or any one of the nucleic acids provided in Table A2.

[0299] Concerning PLA2-like polypeptides, it should be clear that the applicability of the present invention is not restricted to the PLA2-like polypeptide-encoding nucleic acid represented by SEQ ID NO: 252, nor is the applicability of the invention restricted to expression of a PLA2-like polypeptide-encoding nucleic acid when driven by a constitutive promoter.

[0300] The constitutive promoter is preferably a medium strength promoter, more preferably selected from a plant derived promoter, such as a GOS2 promoter, more preferably is the promoter GOS2 promoter from rice. Further preferably the constitutive promoter is represented by a nucleic acid sequence substantially similar to SEQ ID NO: 370, most preferably the constitutive promoter is as represented by SEQ ID NO: 370. See the “Definitions” section herein for further examples of constitutive promoters.

[0301] Optionally, one or more terminator sequences may be used in the construct introduced into a plant. Preferably, the construct comprises an expression cassette comprising a GOS2 promoter, substantially similar to SEQ ID NO: 370, and the nucleic acid encoding the PLA2-like polypeptide.

[0302] Concerning WOX1-like polypeptides, it should be clear that the applicability of the present invention is not restricted to the WOX1-like polypeptide-encoding nucleic acid represented by SEQ ID NO: 373, nor is the applicability of the invention restricted to expression of a WOX1-like polypeptide-encoding nucleic acid when driven by a constitutive promoter.

[0303] The constitutive promoter is preferably a medium strength promoter, more preferably selected from a plant derived promoter, such as a GOS2 promoter, more preferably is the promoter GOS2 promoter from rice. Further preferably the constitutive promoter is represented by a nucleic acid sequence substantially similar to SEQ ID NO: 477, most preferably the constitutive promoter is as represented by SEQ ID NO: 477. See the “Definitions” section herein for further examples of constitutive promoters.

[0304] Optionally, one or more terminator sequences may be used in the construct introduced into a plant. Preferably, the construct comprises an expression cassette comprising a GOS2 promoter, substantially similar to SEQ ID NO: 477, and the nucleic acid encoding the WOX1-like polypeptide.

[0305] Additional regulatory elements may include transcriptional as well as translational enhancers. Those skilled in the art will be aware of terminator and enhancer sequences that may be suitable for use in performing the invention. An intron sequence may also be added to the 5′ untranslated region (UTR) or in the coding sequence to increase the amount of the mature message that accumulates in the cytosol, as described in the definitions section. Other control sequences (besides promoter, enhancer, silencer, intron sequences, 3′UTR and/or 5′UTR regions) may be protein and/or RNA stabilizing elements. Such sequences would be known or may readily be obtained by a person skilled in the art.

[0306] The genetic constructs of the invention may further include an origin of replication sequence that is required for maintenance and/or replication in a specific cell type. One example is when a genetic construct is required to be maintained in a bacterial cell as an episomal genetic element (e.g. plasmid or cosmid molecule). Preferred origins of replication include, but are not limited to, the f1-ori and colE1.

[0307] For the detection of the successful transfer of the nucleic acid sequences as used in the methods of the invention and/or selection of transgenic plants comprising these nucleic acids, it is advantageous to use marker genes (or reporter genes). Therefore, the genetic construct may optionally comprise a selectable marker gene. Selectable markers are described in more detail in the “definitions” section herein. The marker genes may be removed or excised from the transgenic cell once they are no longer needed. Techniques for marker removal are known in the art, useful techniques are described above in the definitions section.

[0308] The invention also provides a method for the production of transgenic plants having enhanced yield-related traits relative to control plants, comprising introduction and expression in a plant of any nucleic acid encoding a HSFA4 or a HSFA5 polypeptide, or an OPT4-like polypeptide, or a PLA2-like polypeptide, or a WOX1-like polypeptide, as defined hereinabove.

[0309] More specifically, the present invention provides a method for the production of transgenic plants having enhanced yield-related traits, which method comprises:
[0310] (i) introducing and expressing in a plant or plant cell a HSFA4 or a HSFA5 polypeptide-encoding nucleic acid; and
[0311] (ii) cultivating the plant cell under conditions promoting plant growth and development.

[0312] The nucleic acid of (i) may be any of the nucleic acids capable of encoding a HSFA4 or a HSFA5 polypeptide as defined herein.

[0313] More specifically, the present invention also provides a method for the production of transgenic plants having enhanced yield-related traits, particularly increased (seed) yield, which method comprises:
[0314] (i) introducing and expressing in a plant or plant cell nucleic acid encoding an OPT4-like polypeptide, or a PLA2-like polypeptide, or a WOX1-like polypeptide; and
[0315] (ii) cultivating the plant cell under conditions promoting plant growth and development.

[0316] The nucleic acid of (i) may be any of the nucleic acids capable of encoding an OPT4-like polypeptide, or a PLA2-like polypeptide, or a WOX1-like polypeptide, as defined herein.

[0317] The nucleic acid may be introduced directly into a plant cell or into the plant itself (including introduction into a tissue, organ or any other part of a plant). According to a preferred feature of the present invention, the nucleic acid is preferably introduced into a plant by transformation. The term “transformation” is described in more detail in the “definitions” section herein.

[0318] The genetically modified plant cells can be regenerated via all methods with which the skilled worker is familiar. Suitable methods can be found in the abovementioned publications by S. D. Kung and R. Wu, Potrykus or Hofgen and Willmitzer.

[0319] Generally after transformation, plant cells or cell groupings are selected for the presence of one or more markers which are encoded by plant-expressible genes co-transferred with the gene of interest, following which the transformed material is regenerated into a whole plant. To select transformed plants, the plant material obtained in the transformation is, as a rule, subjected to selective conditions so that transformed plants can be distinguished from untransformed plants. For example, the seeds obtained in the above-described manner can be planted and, after an initial growing period, subjected to a suitable selection by spraying. A further possibility consists in growing the seeds, if appropriate after sterilization, on agar plates using a suitable selection agent so that only the transformed seeds can grow into plants. Alternatively, the transformed plants are screened for the presence of a selectable marker such as the ones described above.

[0320] Following DNA transfer and regeneration, putatively transformed plants may also be evaluated, for instance using Southern analysis, for the presence of the gene of interest, copy number and/or genomic organisation. Alternatively or additionally, expression levels of the newly introduced DNA may be monitored using Northern and/or Western analysis, both techniques being well known to persons having ordinary skill in the art.

[0321] The generated transformed plants may be propagated by a variety of means, such as by clonal propagation or classical breeding techniques. For example, a first generation (or T1) transformed plant may be selfed and homozygous second-generation (or T2) transformants selected, and the T2 plants may then further be propagated through classical breeding techniques. The generated transformed organisms may take a variety of forms. For example, they may be chimeras of transformed cells and non-transformed cells; clonal transformants (e.g., all cells transformed to contain the expression cassette); grafts of transformed and untransformed tissues (e.g., in plants, a transformed rootstock grafted to an untransformed scion).

[0322] The present invention clearly extends to any plant cell or plant produced by any of the methods described herein, and to all plant parts and propagules thereof. The present invention extends further to encompass the progeny of a primary transformed or transfected cell, tissue, organ or whole plant that has been produced by any of the aforementioned methods, the only requirement being that progeny exhibit the same genotypic and/or phenotypic characteristic(s) as those produced by the parent in the methods according to the invention.

[0323] The present invention clearly extends to any plant cell or plant produced by any of the methods described herein, and to all plant parts and propagules thereof. The present invention extends further to encompass the progeny of a primary transformed or transfected cell, tissue, organ or whole plant that has been produced by any of the aforementioned methods, the only requirement being that progeny exhibit the same genotypic and/or phenotypic characteristic(s) as those produced by the parent in the methods according to the invention.

[0324] The invention also includes host cells containing an isolated nucleic acid encoding a HSFA4 or a HSFA5 polypeptide, or an OPT4-like polypeptide, or a PLA2-like polypeptide, or a WOX1-like polypeptide, as defined hereinabove. Preferred host cells according to the invention are plant cells. Host plants for the nucleic acids or the vector used in the method according to the invention, the expression cassette or construct or vector are, in principle, advantageously all plants, which are capable of synthesizing the polypeptides used in the inventive method.

[0325] The methods of the invention are advantageously applicable to any plant. Plants that are particularly useful in the methods of the invention include all plants which belong to the superfamily Viridiplantae, in particular monocotyledonous and dicotyledonous plants including fodder or forage legumes, ornamental plants, food crops, trees or shrubs. According to a preferred embodiment of the present invention, the plant is a crop plant. Examples of crop plants include soybean, sunflower, canola, alfalfa, rapeseed, linseed, cotton, tomato, potato and tobacco. Further preferably, the plant is a monocotyledonous plant. Examples of monocotyledonous plants include sugarcane. More preferably the plant is a cereal. Examples of cereals include rice, maize, wheat, barley, millet, rye, triticale, sorghum, emmer, spelt, secale, einkorn, teff, milo and oats.

[0326] The invention also extends to harvestable parts of a plant such as, but not limited to seeds, leaves, fruits, flowers, stems, roots, rhizomes, tubers and bulbs, which harvestable parts comprise a recombinant nucleic acid encoding a HSFA4 or a HSFA5 polypeptide, or an OPT4-like polypeptide, or a PLA2-like polypeptide, or a WOX1-like polypeptide. The invention furthermore relates to products derived, preferably directly derived, from a harvestable part of such a plant, such as dry pellets or powders, oil, fat and fatty acids, starch or proteins.

[0327] According to a preferred feature of the invention, the modulated expression is increased expression. Methods for increasing expression of nucleic acids or genes, or gene products, are well documented in the art and examples are provided in the definitions section.

[0328] As mentioned above, a preferred method for modulating expression of a nucleic acid encoding a HSFA4 or a HSFA5 polypeptide, or an OPT4-like polypeptide, or a PLA2-like polypeptide, or a WOX1-like polypeptide, is by introducing and expressing in a plant a nucleic acid encoding a HSFA4 or a HSFA5 polypeptide, or an OPT4-like polypeptide, or a PLA2-like polypeptide, or a WOX1-like polypeptide; however the effects of performing the method, i.e. enhancing yield-related traits may also be achieved using other well known techniques, including but not limited to T-DNA activation tagging, TILLING, homologous recombination. A description of these techniques is provided in the definitions section.

[0329] The present invention also encompasses use of nucleic acids encoding HSFA4 or HSFA5 polypeptides, or OPT4-like polypeptides, or PLA2-like polypeptides, or WOX1-like polypeptides, as described herein and use of these HSFA4 or HSFA5 polypeptides, or OPT4-like polypeptides, or PLA2-like polypeptides, or WOX1-like polypeptides, in enhancing any of the aforementioned yield-related traits in plants.

[0330] Nucleic acids encoding a HSFA4 or a HSFA5 polypeptide, or an OPT4-like polypeptide, or a PLA2-like polypeptide, or a WOX1-like polypeptide, described herein, or the HSFA4 or HSFA5 polypeptides, or OPT4-like polypeptides, or PLA2-like polypeptides, or WOX1-like polypeptides, themselves, may find use in breeding programmes in which a DNA marker is identified which may be genetically linked to a gene encoding a HSFA4 or a HSFA5 polypeptide, or an OPT4-like polypeptide, or a PLA2-like polypeptide, or a WOX1-like polypeptide. The nucleic acids/genes, or the HSFA4 or HSFA5 polypeptides, or OPT4-like polypeptides, or PLA2-like polypeptides, or WOX1-like polypeptides, themselves may be used to define a molecular marker. This DNA or protein marker may then be used in breeding programmes to select plants having enhanced yield-related traits as defined hereinabove in the methods of the invention.

[0331] Allelic variants of a HSFA4 or a HSFA5 polypeptide-encoding nucleic acid/gene may also find use in marker-assisted breeding programmes. Such breeding programmes sometimes require introduction of allelic variation by mutagenic treatment of the plants, using for example EMS mutagenesis; alternatively, the programme may start with a collection of allelic variants of so called “natural” origin caused unintentionally. Identification of allelic variants then takes place, for example, by PCR. This is followed by a step for selection of superior allelic variants of the sequence in question and which give increased yield. Selection is typically carried out by monitoring growth performance of plants containing different allelic variants of the sequence in question. Growth performance may be monitored in a greenhouse or in the field. Further optional steps include crossing plants in which the superior allelic variant was identified with another plant. This could be used, for example, to make a combination of interesting phenotypic features.

[0332] Nucleic acids encoding HSFA4 or HSFA5 polypeptides, or OPT4-like polypeptides, or PLA2-like polypeptides, or WOX1-like polypeptides, may also be used as probes for genetically and physically mapping the genes that they are a part of, and as markers for traits linked to those genes. Such information may be useful in plant breeding in order to develop lines with desired phenotypes. Such use of nucleic acids encoding HSFA4 or HSFA5 polypeptides, or OPT4-like polypeptides, or PLA2-like polypeptides, or WOX1-like polypeptides, requires only a nucleic acid sequence of at least 15 nucleotides in length. The nucleic acids encoding HSFA4 or HSFA5 polypeptides, or OPT4-like polypeptides, or PLA2-like polypeptides, or WOX1-like polypeptides, may be used as restriction fragment length polymorphism (RFLP) markers. Southern blots (Sambrook J, Fritsch E F and Maniatis T (1989) Molecular Cloning, A Laboratory Manual) of restriction-digested plant genomic DNA may be probed with the nucleic acids encoding HSFA4 or HSFA5 polypeptides, or OPT4-like polypeptides, or PLA2-like polypeptides, or WOX1-like polypeptides. The resulting banding patterns may then be subjected to genetic analyses using computer programs such as MapMaker (Lander et al. (1987) Genomics 1: 174-181) in order to construct a genetic map. In addition, the nucleic acids may be used to probe Southern blots containing restriction endonuclease-treated genomic DNAs of a set of individuals representing parent and progeny of a defined genetic cross. Segregation of the DNA polymorphisms is noted and used to calculate the position of the nucleic acid encoding HSFA4 or HSFA5 polypeptides, or OPT4-like polypeptides, or PLA2-like polypeptides, or WOX1-like polypeptides, in the genetic map previously obtained using this population (Botstein et al. (1980) Am. J. Hum. Genet. 32:314-331).

[0333] The production and use of plant gene-derived probes for use in genetic mapping is described in Bernatzky and Tanksley (1986) Plant Mol. Biol. Reporter 4: 37-41. Numerous publications describe genetic mapping of specific cDNA clones using the methodology outlined above or variations thereof. For example, F2 intercross populations, backcross populations, randomly mated populations, near isogenic lines, and other sets of individuals may be used for mapping. Such methodologies are well known to those skilled in the art.

[0334] The nucleic acid probes may also be used for physical mapping (i.e., placement of sequences on physical maps; see Hoheisel et al. In: Non-mammalian Genomic Analysis: A Practical Guide, Academic press 1996, pp. 319-346, and references cited therein).

[0335] In another embodiment, the nucleic acid probes may be used in direct fluorescence in situ hybridisation (FISH) mapping (Trask (1991) Trends Genet. 7:149-154). Although current methods of FISH mapping favour use of large clones (several kb to several hundred kb; see Laan et al. (1995) Genome Res. 5:13-20), improvements in sensitivity may allow performance of FISH mapping using shorter probes.

[0336] A variety of nucleic acid amplification-based methods for genetic and physical mapping may be carried out using the nucleic acids. Examples include allele-specific amplification (Kazazian (1989) J. Lab. Clin. Med 11:95-96), polymorphism of PCR-amplified fragments (CAPS; Sheffield et al. (1993) Genomics 16:325-332), allele-specific ligation (Landegren et al. (1988) Science 241:1077-1080), nucleotide extension reactions (Sokolov (1990) Nucleic Acid Res. 18:3671), Radiation Hybrid Mapping (Walter et al. (1997) Nat. Genet. 7:22-28) and Happy Mapping (Dear and Cook (1989) Nucleic Acid Res. 17:6795-6807). For these methods, the sequence of a nucleic acid is used to design and produce primer pairs for use in the amplification reaction or in primer extension reactions. The design of such primers is well known to those skilled in the art. In methods employing PCR-based genetic mapping, it may be necessary to identify DNA sequence differences between the parents of the mapping cross in the region corresponding to the instant nucleic acid sequence. This, however, is generally not necessary for mapping methods.

[0337] The methods according to the present invention result in plants having enhanced yield-related traits, as described hereinbefore. These traits may also be combined with other economically advantageous traits, such as further yield-enhancing traits, tolerance to other abiotic and biotic stresses, traits modifying various architectural features and/or biochemical and/or physiological features.

### Items

### 1. HSF Polypeptides

[0338] 1. A method for enhancing yield-related traits in plants relative to control plants, comprising modulating expression in a plant of a nucleic acid encoding a HSFA4 or a HSFA5 polypeptide, said polypeptide comprising a domain or a motif having in increasing order of preference at least 50%, 51%, 52%, 53%, 54%, 55%, 56%, 57%, 58%, 59%, 60%, 61%, 62%, 63%, 64%, 65%, 66%, 67%, 68%, 69%, 70%, 71%, 72%, 73%, 74%, 75%, 76%, 77%, 78%, 79%, 80%, 81%, 82%, 83%, 84%, 85%, 86%, 87%, 88%, 89%, 90%, 91%, 92%, 93%, 94%, 95%, 96%, 97%, 98%, or 99% overall sequence identity to the amino acid represented by:
   [0339] (i) SEQ ID NO: 47 to SEQ ID NO: 70 (DNA binding domain); and
   [0340] (ii) SEQ ID NO: 71 to SEQ ID NO: 94 (Oligomerisation domain); and
   [0341] (iii) SEQ ID NO: 95 to SEQ ID NO: 118 (Activation AHA motif); and
   [0342] (iv) wherein the polypeptide is a HSFA5 polypeptide:
      [0343] i. SEQ ID NO:119 to SEQ ID NO: 127 (HSF5A motif I); and/or
      [0344] ii. SEQ ID NO:128 to SEQ ID NO: 136 (HSF5A motif II); and
   [0345] (v) wherein the polypeptide is a HSF4A polypeptide:
      [0346] i. SEQ ID NO:137 to SEQ ID NO: 151 (HSF4A motif I).
[0347] 2. Method according to item 1, wherein said modulated expression is effected by introducing and expressing in a plant a nucleic acid encoding a HSFA4 or a HSFA5 polypeptide.
[0348] 3. Method according to item 1 or 2, comprising decreasing expression of said nucleic acid encoding a HSFA4
[0349] 4. Method according to item 1 or 2 comprising increasing expression of said nucleic acid encoding a HSFA5.
[0350] 5. Method according to any one of items 1 to 4, wherein said nucleic acid encoding a HSFA4 or a HSFA5 polypeptide encodes any one of the proteins listed in Table A1 or is a portion of such a nucleic acid, or a nucleic acid capable of hybridising with such a nucleic acid.
[0351] 6. Method according to any one of items 1 to 5, wherein said nucleic acid sequence encodes an orthologue or paralogue of any of the proteins given in Table A1.
[0352] 7. Method according to any preceding item, wherein said enhanced yield-related traits comprise increased yield, preferably increased biomass and/or increased seed yield relative to control plants.
[0353] 8. Method according to any one of items 1 to 7, wherein said enhanced yield-related traits are obtained under non-stress conditions.
[0354] 9. Method according to any one of items 1 to 7, wherein said enhanced yield-related traits are obtained under conditions of drought stress, salt stress or nitrogen deficiency.
[0355] 10. Method according to any one of items 2 to 9, wherein said nucleic acid is operably linked to a constitutive promoter, preferably to a GOS2 promoter, most preferably to a GOS2 promoter from rice.
[0356] 11. Method according to any one of items 1 to 10, wherein said nucleic acid encoding a HSFA4 or a HSFA5 polypeptide is of plant origin, preferably from a dicotyledonous plant, further preferably from the family Brassicaceae, more preferably from the genus Arabidopsis, most preferably from Arabidopsis thaliana.
[0357] 12. Plant or part thereof, including seeds, obtainable by a method according to any one of items 1 to 11, wherein said plant or part thereof comprises a recombinant nucleic acid encoding a HSFA4 or a HSFA5 polypeptide.
[0358] 13. Construct comprising:
   [0359] (i) nucleic acid encoding a HSFA4 or a HSFA5 polypeptide;
   [0360] (ii) one or more control sequences capable of driving expression of the nucleic acid sequence of (i); and optionally
   [0361] (iii) a transcription termination sequence.
[0362] 14. Construct according to item 13, wherein one of said control sequences is a constitutive promoter, preferably a GOS2 promoter, most preferably a GOS2 promoter from rice.
[0363] 15. Use of a construct according to item 13 or 43 in a method for making plants having increased yield, particularly increased biomass and/or increased seed yield relative to control plants.
[0364] 16. Plant, plant part or plant cell transformed with a construct according to item 13 or 14.
[0365] 17. Method for the production of a transgenic plant having increased yield, particularly increased biomass and/or increased seed yield relative to control plants, comprising:
   [0366] (i) introducing and expressing in a plant a nucleic acid encoding HSFA4 or a HSFA5 polypeptide; and
   [0367] (ii) cultivating the plant cell under conditions promoting plant growth and development.
[0368] 18. Transgenic plant having increased yield, particularly increased biomass and/or increased seed yield, relative to control plants, resulting from modulated expression of a nucleic acid encoding a HSFA4 or a HSFA5 polypeptide, or a transgenic plant cell derived from said transgenic plant.
[0369] 19. Transgenic plant according to item 12, 16 or 18, or a transgenic plant cell derived thereof, wherein said plant is a crop plant or a monocot or a cereal, such as rice, maize, wheat, barley, millet, rye, triticale, sorghum emmer, spelt, secale, einkorn, teff, milo and oats.
[0370] 20. Harvestable parts of a plant according to item 19, wherein said harvestable parts are preferably shoot biomass and/or seeds.
[0371] 21. Products derived from a plant according to item 19 and/or from harvestable parts of a plant according to item 20.
[0372] 22. Use of a nucleic acid encoding a HSFA4 or a HSFA5 polypeptide in increasing yield, particularly in increasing seed yield and/or shoot biomass in plants, relative to control plants.

### 2. OPT4-Like Polypeptides

[0373] 1. An isolated nucleic acid molecule comprising:
   [0374] (a) a nucleic acid represented by SEQ ID NO: 189 or SEQ ID NO: 191;
   [0375] (b) the complement of a nucleic acid represented by SEQ ID NO: 189 or SEQ ID NO: 191;
   [0376] (c) a nucleic acid encoding an OPT4-like polypeptide comprising Motif I: NPG and Motif II: KIPPR and having, in increasing order of preference, at least 50%, 55%, 60%, 65%, 70%, 75%, 80%, 85%, 90%, 95%, 96%, 97%, 98%, 99% or more sequence identity to the amino acid sequence represented by SEQ ID NO: 190 or SEQ ID NO: 192.
[0377] 2. An isolated polypeptide comprising:
   [0378] (a) an amino acid sequence represented by SEQ ID NO: 190 or SEQ ID NO: 192;
   [0379] (b) an amino acid sequence comprising Motif I: NPG and Motif II: KIPPR and having, in increasing order of preference, at least 50%, 55%, 60%, 65%, 70%, 75%, 80%, 85%, 90%, 95%, 96%, 97%, 98%, 99% or more sequence identity to the amino acid sequence represented by SEQ ID NO: 190 or SEQ ID NO: 192.
   [0380] (c) derivatives of any of the amino acid sequences given in (i) or (ii) above.
[0381] 3. A method for enhancing yield-related traits in plants relative to control plants, comprising modulating expression in a plant of a nucleic acid encoding an OPT4-like polypeptide comprising Motif I: NPG and Motif II: KIPPR.
[0382] 4. Method according to item 3, wherein said OPT4-like polypeptide when used in the construction of a phylogenetic tree, such as the one depicted in FIG. 2, clusters with the group of OPT4-like polypeptides defined by Clade I, II, III or IV, most preferably to the Clade comprising the amino acid sequence represented by SEQ ID NO: 156.
[0383] 5. Method according to item 3 or 4, wherein said modulated expression is effected by introducing and expressing in a plant a nucleic acid encoding an OPT4-like polypeptide.
[0384] 6. Method according to any one of items 3 to 5, wherein said nucleic acid encoding an OPT4-like polypeptide encodes any one of the proteins listed in Table A2 or is a portion of such a nucleic acid, or a nucleic acid capable of hybridising with such a nucleic acid.
[0385] 7. Method according to any one of items 3 to 6, wherein said nucleic acid sequence encodes an orthologue or paralogue of any of the proteins given in Table A2.
[0386] 8. Method according to any preceding item, wherein said enhanced yield-related traits comprise increased yield, preferably increased biomass and/or increased seed yield relative to control plants.
[0387] 9. Method according to any one of items 3 to 8, wherein said enhanced yield-related traits are obtained under conditions of nitrogen deficiency.
[0388] 10. Method according to any one of items 3 to 9, wherein said nucleic acid is operably linked to a constitutive promoter, preferably to a GOS2 promoter, most preferably to a GOS2 promoter from rice.
[0389] 11. Method according to any one of items 3 to 10, wherein said nucleic acid encoding an OPT4-like polypeptide is of plant origin, preferably from a dicotyledonous plant, further preferably from the family Brassicaceae, more preferably from the genus Arabidopsis, most preferably from Arabidopsis thaliana.
[0390] 12. Plant or part thereof, including seeds, obtainable by a method according to any one of items 3 to 11, wherein said plant or part thereof comprises a recombinant nucleic acid encoding an OPT4-like polypeptide.
[0391] 13. Construct comprising:
   [0392] (i) nucleic acid encoding an OPT4-like polypeptide as defined in items 2 to 4;
   [0393] (ii) one or more control sequences capable of driving expression of the nucleic acid sequence of (a); and optionally
   [0394] (iii) a transcription termination sequence.
[0395] 14. Construct according to item 13, wherein one of said control sequences is a constitutive promoter, preferably a GOS2 promoter, most preferably a GOS2 promoter from rice.
[0396] 15. Use of a construct according to item 13 or 14 in a method for making plants having increased yield, particularly increased biomass and/or increased seed yield relative to control plants.
[0397] 16. Plant, plant part or plant cell transformed with a construct according to item 13 or 14.
[0398] 17. Method for the production of a transgenic plant having increased yield, particularly increased biomass and/or increased seed yield relative to control plants, comprising:
   [0399] (i) introducing and expressing in a plant a nucleic acid encoding an OPT4-like polypeptide as defined in any one of items 2 to 4; and
   [0400] (ii) cultivating the plant cell under conditions promoting plant growth and development.
[0401] 18. Transgenic plant having increased yield, particularly increased biomass and/or increased seed yield, relative to control plants, resulting from modulated expression of a nucleic acid encoding an OPT4-like polypeptide as defined in any one of items 2 to 4, or a transgenic plant cell derived from said transgenic plant.
[0402] 19. Transgenic plant according to item 12, 16 or 18, or a transgenic plant cell derived thereof, wherein said plant is a crop plant or a monocot or a cereal, such as rice, maize, wheat, barley, millet, rye, triticale, sorghum emmer, spelt, secale, einkorn, teff, milo and oats.
[0403] 20. Harvestable parts of a plant according to item 19, wherein said harvestable parts are preferably shoot biomass and/or seeds.
[0404] 21. Products derived from a plant according to item 19 and/or from harvestable parts of a plant according to item 20.
[0405] 22. Use of a nucleic acid encoding an OPT4-like polypeptide in increasing yield, particularly in increasing seed yield and/or shoot biomass in plants, relative to control plants.

### 3. PLA2-Like Polypeptides

[0406] 1. A method for enhancing yield-related traits in plants relative to control plants, comprising modulating expression in a plant of a nucleic acid encoding a PLA2-like polypeptide comprising an RNA recognition motif 2 and Motif III: T [TS] [VL] [MI] [IV] [KR] NIPN.
[0407] 2. Method according to item 1, wherein said PLA2-like polypeptide comprises Motif IV: SP[PA]RDG and/or Motif V: NK[CS]NVGYGFVN[ML]TSP[QE]A.
[0408] 3. Method according to item 1 or 2, wherein said modulated expression is effected by introducing and expressing in a plant a nucleic acid encoding a PLA2-like polypeptide.
[0409] 4. Method according to any one of items 1 to 3, wherein said nucleic acid encoding a PLA2-like polypeptide encodes any one of the proteins listed in Table A3 or is a portion of such a nucleic acid, or a nucleic acid capable of hybridising with such a nucleic acid.
[0410] 5. Method according to any one of items 1 to 4, wherein said nucleic acid sequence encodes an orthologue or paralogue of any of the proteins given in Table A3.
[0411] 6. Method according to any preceding item, wherein said enhanced yield-related traits comprise increased yield, preferably increased biomass and/or increased seed yield relative to control plants.
[0412] 7. Method according to any one of items 1 to 6, wherein said enhanced yield-related traits are obtained under non-stress conditions.
[0413] 8. Method according to any one of items 1 to 6, wherein said enhanced yield-related traits are obtained under nitrogen-stress conditions.
[0414] 9. Method according to any one of items 3 to 8, wherein said nucleic acid is operably linked to a constitutive promoter, preferably to a GOS2 promoter, most preferably to a GOS2 promoter from rice.
[0415] 10. Method according to any one of items 1 to 9, wherein said nucleic acid encoding a PLA2-like polypeptide is of plant origin, preferably from a dicotyledonous plant, further preferably from populus, more preferably from Populus trichocarpa.
[0416] 11. Plant or part thereof, including seeds, obtainable by a method according to any one of items 1 to 10, wherein said plant or part thereof comprises a recombinant nucleic acid encoding a PLA2-like polypeptide.
[0417] 12. Construct comprising:
   [0418] (i) nucleic acid encoding a PLA2-like polypeptide as defined in items 1 or 2;
   [0419] (ii) one or more control sequences capable of driving expression of the nucleic acid sequence of (a); and optionally
   [0420] (iii) a transcription termination sequence.
[0421] 13. Construct according to item 12, wherein one of said control sequences is a constitutive promoter, preferably a GOS2 promoter, most preferably a GOS2 promoter from rice.
[0422] 14. Use of a construct according to item 12 or 13 in a method for making plants having increased yield, particularly increased biomass and/or increased seed yield relative to control plants.
[0423] 15. Plant, plant part or plant cell transformed with a construct according to item 12 or 13.
[0424] 16. Method for the production of a transgenic plant having increased yield, particularly increased biomass and/or increased seed yield relative to control plants, comprising:
   [0425] (i) introducing and expressing in a plant a nucleic acid encoding a PLA2-like polypeptide as defined in item 1 or 2; and
   [0426] (ii) cultivating the plant cell under conditions promoting plant growth and development.
[0427] 17. Transgenic plant having increased yield, particularly increased biomass and/or increased seed yield, relative to control plants, resulting from modulated expression of a nucleic acid encoding a PLA2-like polypeptide as defined in item 1 or 2, or a transgenic plant cell derived from said transgenic plant.
[0428] 18. Transgenic plant according to item 11, 15 or 17, or a transgenic plant cell derived thereof, wherein said plant is a crop plant or a monocot or a cereal, such as rice, maize, wheat, barley, millet, rye, triticale, sorghum emmer, spelt, secale, einkorn, teff, milo, sugarcane and oats.
[0429] 19. Harvestable parts of a plant according to item 18, wherein said harvestable parts are preferably shoot biomass and/or seeds.
[0430] 20. Products derived from a plant according to item 18 and/or from harvestable parts of a plant according to item 19.
[0431] 21. Use of a nucleic acid encoding a PLA2-like polypeptide in increasing yield, particularly in increasing seed yield and/or shoot biomass in plants, relative to control plants.

### 4. WOX1-Like Polypeptides

[0432] 1. A method for enhancing yield-related traits in plants relative to control plants, comprising modulating expression in a plant of a nucleic acid encoding a WOX1-like polypeptide, wherein said WOX1-like polypeptide comprises homeodomain represented by Motif VI: WNPTPEQLRTLEDLYRRGTRAPSTDQIQDITAQLRRYGRIEGKNVFYWFQNHKARER QK or a motif having in increasing order of preference at least 50%, 55%, 60%, 65%, 70%, 75%, 80%, 85%, 90%, 95%, 96%, 97%, 98%, 99% or more sequence identity to Motif I.
[0433] 2. Method according to item 1, wherein said WOX1-like polypeptide comprises one or more of the following motifs:
   [0434] (a) Motif VII: KNWAPS or a motif having in increasing order of preference at least 50%, 55%, 60%, 65%, 70%, 75%, 80%, 85%, 90%, 95%, 96%, 97%, 98%, 99% or more sequence identity to Motif VII;
   [0435] (b) Motif VIII: QTLQPFPLR or a motif having in increasing order of preference at least 50%, 55%, 60%, 65%, 70%, 75%, 80%, 85%, 90%, 95%, 96%, 97%, 98%, 99% or more sequence identity to Motif VIII, wherein Motif VIII is a WUS-like motif but does not have an LELxL repressor motif close to EAR motif;
   [0436] (c) Motif IX: FEFLPLKH or a motif having in increasing order of preference at least 50%, 55%, 60%, 65%, 70%, 75%, 80%, 85%, 90%, 95%, 96%, 97%, 98%, 99% or more sequence identity to Motif IX.
[0437] 3. Method according to item 1 or 2, wherein said modulated expression is effected by introducing and expressing in a plant a nucleic acid encoding a WOX1-like polypeptide.
[0438] 4. Method according to any one of items 1 to 3, wherein said nucleic acid encoding a WOX1-like polypeptide encodes any one of the proteins listed in Table A4 or is a portion of such a nucleic acid, or a nucleic acid capable of hybridising with such a nucleic acid.
[0439] 5. Method according to any one of items 1 to 4, wherein said nucleic acid sequence encodes an orthologue or paralogue of any of the proteins given in Table A4.
[0440] 6. Method according to any preceding item, wherein said enhanced yield-related traits comprise increased yield, preferably increased biomass and/or increased seed yield relative to control plants.
[0441] 7. Method according to any one of items 1 to 6, wherein said enhanced yield-related traits are obtained under non-stress conditions.
[0442] 8. Method according to any one of items 3 to 7, wherein said nucleic acid is operably linked to a constitutive promoter, preferably to a GOS2 promoter, most preferably to a GOS2 promoter from rice.
[0443] 9. Method according to any one of items 1 to 8, wherein said nucleic acid encoding a WOX1-like polypeptide is of plant origin, preferably from a dicotyledonous plant, further preferably from populus, more preferably from the Populus trichocarpa.
[0444] 10. Plant or part thereof, including seeds, obtainable by a method according to any one of items 1 to 9, wherein said plant or part thereof comprises a recombinant nucleic acid encoding a WOX1-like polypeptide.
[0445] 11. Construct comprising:
   [0446] (i) nucleic acid encoding a WOX1-like polypeptide as defined in items 1 or 2;
   [0447] (ii) one or more control sequences capable of driving expression of the nucleic acid sequence of (a); and optionally
   [0448] (iii) a transcription termination sequence.
[0449] 12. Construct according to item 11, wherein one of said control sequences is a constitutive promoter, preferably a GOS2 promoter, most preferably a GOS2 promoter from rice.
[0450] 13. Use of a construct according to item 11 or 12 in a method for making plants having increased yield, particularly increased biomass and/or increased seed yield relative to control plants.
[0451] 14. Plant, plant part or plant cell transformed with a construct according to item 11 or 12.
[0452] 15. Method for the production of a transgenic plant having increased yield, particularly increased biomass and/or increased seed yield relative to control plants, comprising:
   [0453] (i) introducing and expressing in a plant a nucleic acid encoding a WOX1-like polypeptide as defined in item 1 or 2; and
   [0454] (ii) cultivating the plant cell under conditions promoting plant growth and development.
[0455] 16. Transgenic plant having increased yield, particularly increased biomass and/or increased seed yield, relative to control plants, resulting from modulated expression of a nucleic acid encoding a WOX1-like polypeptide as defined in item 1 or 2, or a transgenic plant cell derived from said transgenic plant.
[0456] 17. Transgenic plant according to item 10, 14 or 16, or a transgenic plant cell derived thereof, wherein said plant is a crop plant or a monocot or a cereal, such as rice, maize, wheat, barley, millet, rye, triticale, sorghum emmer, spelt, secale, einkorn, teff, milo and oats.
[0457] 18. Harvestable parts of a plant according to item 17, wherein said harvestable parts are preferably shoot biomass and/or seeds.
[0458] 19. Products derived from a plant according to item 17 and/or from harvestable parts of a plant according to item 18.
[0459] 20. Use of a nucleic acid encoding a WOX1-like polypeptide in increasing yield, particularly in increasing seed yield and/or shoot biomass in plants, relative to control plants.

### DESCRIPTION OF FIGURES

[0460] The present invention will now be described with reference to the following figures in which:

[0461] FIG. 1 represents a multiple alignment of HSF polypeptides.

[0462] FIG. 2 represents a phylogenetic tree of plant HSF as described in FIG. 2 of Koskull-Doring et al. 2007.

[0463] FIG. 3 represents the binary vector used for increased expression in Oryza sativa of HSFA5-encoding nucleic acid under the control of a rice GOS2 promoter (pGOS2)

[0464] FIG. 4 represents a multiple alignment. The proteins were aligned using MUSCLE 3.7 with its default parameters (Edgar, Robert C. (2004), MUSCLE: multiple sequence alignment with high accuracy and high throughput, Nucleic Acids Research 32(5), 1792-97.).

[0465] FIG. 5 shows a circular phylogram of OPT4-like polypeptide sequences. A Neighbour-Joining tree was calculated using CLUSTALW (Thompson, J. D., Higgins, D. G. and Gibson, T. J. (1994) CLUSTAL W: improving the sensitivity of progressive multiple sequence alignments through sequence weighting, position specific gap penalties and weight matrix choice. Nucl. Acids Res. 22:4673-4680.). Support of the major branching is indicated for 100 bootstrap repetitions. A circular phylogram was drawn using Dendroscope (Daniel H Huson, Daniel C Richter, Christian Rausch, Tobias Dezulian, Markus Franz and Regula Rupp. Dendroscope: An interactive viewer for large phylogenetic trees. BMC Bioinformatics. 2007 Nov. 22; 8(1):460.). The YSP transporter family is used as an outgroup.

[0466] FIG. 6 represents the binary vector used for increased expression in Oryza sativa of an OPT4-like-encoding nucleic acid under the control of a rice GOS2 promoter (pGOS2).

[0467] FIG. 7 represents a multiple alignment. The proteins were aligned using MUSCLE 3.7 with its default parameters (Edgar, Robert C. (2004), MUSCLE: multiple sequence alignment with high accuracy and high throughput, Nucleic Acids Research 32(5), 1792-97.).

[0468] FIG. 8 shows a circular phylogram of selected PLA2-like proteins. The proteins were aligned using MUSCLE (Edgar (2004), Nucleic Acids Research 32(5): 1792-97). A Neighbour-Joining tree was calculated using QuickTree (Howe et al. (2002), Bioinformatics 18(11): 1546-7). Support of the major branching after 100 bootstrap repetitions is indicated. A circular phylogram was drawn using Dendroscope (Huson et al. (2007), BMC Bioinformatics 8(1):460).

[0469] FIG. 9 represents the binary vector used for increased expression in Oryza sativa of a PLA2-like-encoding nucleic acid under the control of a rice GOS2 promoter (pGOS2).

[0470] FIG. 10 shows an alignment of WOX1-like polypeptide sequences. Alignment was performed using the ClustalW 2.0 algorithm of progressive alignment (Thompson et al. (1997) Nucleic Acids Res 25:4876-4882; Chenna et al. (2003). Nucleic Acids Res 31:3497-3500) with standard setting (slow alignment, similarity matrix: Gonnet, gap opening penalty 10, gap extension penalty: 0.2). Minor manual editing was done to further optimise the alignment.

[0471] FIG. 11 shows a phylogenetic tree of WOX1-like polypeptides constructed using a neighbour-joining clustering algorithm as provided in the AlignX programme from the Vector NTI (Invitrogen).

[0472] FIG. 12 represents the binary vector used for increased expression in Oryza sativa of a WOX1-like-encoding nucleic acid under the control of a rice GOS2 promoter (pGOS2)

### EXAMPLES

[0473] The present invention will now be described with reference to the following examples, which are by way of illustration alone. The following examples are not intended to completely define or otherwise limit the scope of the invention.

[0474] DNA manipulation: unless otherwise stated, recombinant DNA techniques are performed according to standard protocols described in (Sambrook (2001) Molecular Cloning: a laboratory manual, 3rd Edition Cold Spring Harbor Laboratory Press, CSH, New York) or in Volumes 1 and 2 of Ausubel et al. (1994), Current Protocols in Molecular Biology, Current Protocols. Standard materials and methods for plant molecular work are described in Plant Molecular Biology Labfax (1993) by R. D. D. Croy, published by BIOS Scientific Publications Ltd (UK) and Blackwell Scientific Publications (UK).

### Example 1

### Identification of Sequences Related to the Nucleic Acid Sequence Used in the Methods of the Invention

### 1.1. HSF Polypeptides

[0475] Sequences (full length cDNA, ESTs or genomic) related to the nucleic acid sequence used in the methods of the present invention were identified amongst others in those maintained in the Entrez Nucleotides database at the National Center for Biotechnology Information (NCBI), at The Institute for Genomic Research (TIGR; beginning with TA) and at the by the Joint Genome Institute. To this end database sequence search tools, such as the Basic Local Alignment Tool (BLAST) (Altschul et al. (1990) J. Mol. Biol. 215:403-410; and Altschul et al. (1997) Nucleic Acids Res. 25:3389-3402) were used. The program is used to find regions of local similarity between sequences by comparing nucleic acid or polypeptide sequences to sequence databases and by calculating the statistical significance of matches. For example, the polypeptide encoded by the nucleic acid used in the present invention was used for the TBLASTN algorithm, with default settings and the filter to ignore low complexity sequences set off. The output of the analysis was viewed by pairwise comparison, and ranked according to the probability score (E-value), where the score reflect the probability that a particular alignment occurs by chance (the lower the E-value, the more significant the hit). In addition to E-values, comparisons were also scored by percentage identity. Percentage identity refers to the number of identical nucleotides (or amino acids) between the two compared nucleic acid (or polypeptide) sequences over a particular length. In some instances, the default parameters may be adjusted to modify the stringency of the search. For example the E-value may be increased to show less stringent matches. This way, short nearly exact matches may be identified.

[0476] Table A1 provides a list of nucleic acid sequences related to the nucleic acid sequence used in the methods of the present invention.

TABLE A1
Examples of HSFA4 and HSFA5 polypeptides

| | Nucleic acid | Polypeptide | HSF |
|---|---|---|---|
| Name | SEQ ID NO: | SEQ ID NO: | class |
| M. truncatula_AC146585_2.5 | 1 | 2 | HSFA5 |
| A. thaliana_AT4G13980.1 | 3 | 4 | HSFA5 |
| ---4957@1-M. truncatula | 5 | 6 | HSFA5 |
| G. max_Gm0003x00291 | 7 | 8 | HSFA5 |
| G. max_Gm0022x00445 | 9 | 10 | HSFA5 |
| M. truncatula_AC187466_52.4 | 11 | 12 | HSFA5 |
| O. sativa_LOC_Os02g29340.1 | 13 | 14 | HSFA5 |
| P. trichocarpa_scaff_88.24 | 15 | 16 | HSFA5 |
| P. trichocarpa_scaff_I.2223 | 17 | 18 | HSFA5 |
| A. thaliana_AT4G18880.1 | 19 | 20 | HSFA4 |
| A. thaliana_AT5G45710.1 | 21 | 22 | HSFA4 |
| ---2468_O. sativa | 23 | 24 | HSFA4 |
| G. max_Gm0003x00186 | 25 | 26 | HSFA4 |
| G. max_Gm0022x00353 | 27 | 28 | HSFA4 |
| G. max_Gm0030x00291 | 29 | 30 | HSFA4 |
| G. max_Gm0070x00147 | 31 | 32 | HSFA4 |
| M. truncatula_AC152407_1.4 | 33 | 34 | HSFA4 |
| O. sativa_LOC_Os01g54550.1 | 35 | 36 | HSFA4 |
| O. sativa_LOC_Os05g45410.1 | 37 | 38 | HSFA4 |
| P. trichocarpa_scaff_XI.679 | 39 | 40 | HSFA4 |
| P. trichocarpa_scaff_XIV.882 | 41 | 42 | HSFA4 |
| S. lycopersicum_TA44843_4081 | 43 | 44 | HSFA4 |
| S. lycopersicum_TA47501_4081 | 45 | 46 | HSFA4 |

### 1.2. OPT4-Like Polypeptides

[0477] Sequences (full length cDNA, ESTs or genomic) related to the nucleic acid sequence of SEQ ID NO: 155 were identified amongst those maintained in the Entrez Nucleotides database at the National Center for Biotechnology Information (NCBI) using database sequence search tools, such as the Basic Local Alignment Tool (BLAST) (Altschul et al. (1990) J. Mol. Biol. 215:403-410; and Altschul et al. (1997) Nucleic Acids Res. 25:3389-3402). The program was used to find regions of local similarity between sequences by comparing nucleic acid or polypeptide sequences to sequence databases and by calculating the statistical significance of matches. For example, the polypeptide sequence of SEQ ID NO: 156 was used for the TBLASTN algorithm, with default settings and the filter to ignore low complexity sequences set off. The output of the analysis was viewed by pairwise comparison, and ranked according to the probability score (E-value), where the score reflect the probability that a particular alignment occurs by chance (the lower the E-value, the more significant the hit). In addition to E-values, comparisons were also scored by percentage identity. Percentage identity refers to the number of identical nucleotides (or amino acids) between the two compared nucleic acid (or polypeptide) sequences over a particular length. In some instances, the default parameters may be adjusted to modify the stringency of the search. For example the E-value may be increased to show less stringent matches. This way, short nearly exact matches may be identified.

TABLE A2
Examples of OPT4-like nucleic acid and polypeptide sequences:

| | | Nucleic acid | Polypeptide |
|---|---|---|---|
| Name | Organism | SEQ ID NO: | SEQ ID NO: |
| A. thaliana_AT1G09930 | Arabidopsis thaliana | 155 | 156 |
| A. thaliana_AT1G48370 | Arabidopsis thaliana | 157 | 158 |
| A. thaliana_AT1G65730 | Arabidopsis thaliana | 159 | 160 |
| A. thaliana_AT3G17650 | Arabidopsis thaliana | 161 | 162 |
| A. thaliana_AT3G27020 | Arabidopsis thaliana | 163 | 164 |
| A. thaliana_AT4G10770 | Arabidopsis thaliana | 165 | 166 |
| A. thaliana_AT4G16370 | Arabidopsis thaliana | 167 | 168 |
| A. thaliana_AT4G24120 | Arabidopsis thaliana | 169 | 170 |
| A. thaliana_AT4G26590 | Arabidopsis thaliana | 171 | 172 |
| A. thaliana_AT4G27730 | Arabidopsis thaliana | 173 | 174 |
| A. thaliana_AT5G24380 | Arabidopsis thaliana | 175 | 176 |
| A. thaliana_AT5G41000 | Arabidopsis thaliana | 177 | 178 |
| A. thaliana_AT5G53510 | Arabidopsis thaliana | 179 | 180 |
| A. thaliana_AT5G53520 | Arabidopsis thaliana | 181 | 182 |
| A. thaliana_AT5G53550 | Arabidopsis thaliana | 183 | 184 |
| A. thaliana_AT5G55930 | Arabidopsis thaliana | 185 | 186 |
| A. thaliana_AT5G64410 | Arabidopsis thaliana | 187 | 188 |
| G. max_14232 | Glycine max | 189 | 190 |
| G. max_9082 | Glycine max | 191 | 192 |
| H. vulgare_AK248429 | Hordeum vulgare | 193 | 194 |
| H. vulgare_AK252224 | Hordeum vulgare | 195 | 196 |
| M. domestica_TA30114 | Malus domestica | 197 | 198 |
| O. sativa_Os01g43940 | Oryza sativa | 199 | 200 |
| O. sativa_Os03g0751100 | Oryza sativa | 201 | 202 |
| O. sativa_Os04g0594800 | Oryza sativa | 203 | 204 |
| O. sativa_Os06g0127700 | Oryza sativa | 205 | 206 |
| O. sativa_Os06g03540 | Oryza sativa | 207 | 208 |
| O. sativa_Os06g03560 | Oryza sativa | 209 | 210 |
| O. sativa_Os08g0492000 | Oryza sativa | 211 | 212 |
| P. patens_86437 | Physcomitrella patens | 213 | 214 |
| P. trichocarpa_II.1010 | Populus trichocarpa | 215 | 216 |
| P. trichocarpa_III.1179 | Populus trichocarpa | 217 | 218 |
| P. trichocarpa_III.621 | Populus trichocarpa | 219 | 220 |
| P. trichocarpa_IX.858 | Populus trichocarpa | 221 | 222 |
| P. trichocarpa_V.588 | Populus trichocarpa | 223 | 224 |
| P. trichocarpa_VI.44 | Populus trichocarpa | 225 | 226 |
| P. trichocarpa_VI.68 | Populus trichocarpa | 227 | 228 |
| P. trichocarpa_XII.248 | Populus trichocarpa | 229 | 230 |
| P. trichocarpa_XII.250 | Populus trichocarpa | 231 | 232 |
| P. trichocarpa_XVI.18 | Populus trichocarpa | 233 | 234 |
| P. trichocarpa_XVI.2 | Populus trichocarpa | 235 | 236 |
| V. vitifera_GSVIVT00005733001 | Vitis vinifera | 237 | 238 |
| V. vitifera_GSVIVT00015061001 | Vitis vinifera | 239 | 240 |
| V. vitifera_GSVIVT00015062001 | Vitis vinifera | 241 | 242 |
| V. vitifera_GSVIVT00037216001 | Vitis vinifera | 243 | 244 |
| Z. mays_TA188146 | Zea mays | 245 | 246 |
| Z. mays_TA192868 | Zea mays | 247 | 248 |

[0478] In some instances, related sequences have tentatively been assembled and publicly disclosed by research institutions, such as The Institute for Genomic Research (TIGR; beginning with TA). The Eukaryotic Gene Orthologs (EGO) database may be used to identify such related sequences, either by keyword search or by using the BLAST algorithm with the nucleic acid sequence or polypeptide sequence of interest. In other instances, special nucleic acid sequence databases have been created for particular organisms, such as by the Joint Genome Institute.

### 1.3. PLA2-Like Polypeptides

[0479] Sequences (full length cDNA, ESTs or genomic) related to SEQ ID NO: 252 and SEQ ID NO: 253 were identified amongst those maintained in the Entrez Nucleotides database at the National Center for Biotechnology Information (NCBI) using database sequence search tools, such as the Basic Local Alignment Tool (BLAST) (Altschul et al. (1990) J. Mol. Biol. 215:403-410; and Altschul et al. (1997) Nucleic Acids Res. 25:3389-3402). The program was used to find regions of local similarity between sequences by comparing nucleic acid or polypeptide sequences to sequence databases and by calculating the statistical significance of matches. For example, the polypeptide encoded by the nucleic acid used in the present invention was used for the TBLASTN algorithm, with default settings and the filter to ignore low complexity sequences set off. The output of the analysis was viewed by pairwise comparison, and ranked according to the probability score (E-value), where the score reflect the probability that a particular alignment occurs by chance (the lower the E-value, the more significant the hit). In addition to E-values, comparisons were also scored by percentage identity. Percentage identity refers to the number of identical nucleotides (or amino acids) between the two compared nucleic acid (or polypeptide) sequences over a particular length. In some instances, the default parameters may be adjusted to modify the stringency of the search. For example the E-value may be increased to show less stringent matches. This way, short nearly exact matches may be identified.

[0480] Table A3 provides a list of nucleic acid sequences related to SEQ ID NO: 252 and SEQ ID NO: 253.

TABLE A3
Examples of PLA2-like polypeptide and nucleic acid sequences:

| | | Poly- |
|---|---|---|
| | Nucleotide | peptide |
| | SEQ | SEQ |
| Name | ID NO: | ID NO: |
| P. trichocarpa_scaff_X.525 | 252 | 253 |
| A. thaliana_AT1G67770.1 | 254 | 255 |
| A. thaliana_AT3G26120.1 | 256 | 257 |
| M. truncatula_AC141435_12.5 | 258 | 259 |
| O. sativa_Os01g0907900_PLA2 | 260 | 261 |
| P. trichocarpa_766607 | 262 | 263 |
| S. bicolor_5266283 | 264 | 265 |
| V. vinifera_GSVIVT00020604001 | 266 | 267 |
| V. vinifera_GSVIVT00030716001 | 268 | 269 |
| Z. mays_TA203160_4577_TE1 | 270 | 271 |
| A. thaliana_AT1G37140.1 | 272 | 273 |
| A. thaliana_AT5G07930.1 | 274 | 275 |
| M. truncatula_AC174297_4.5 | 276 | 277 |
| O. sativa_LOC_Os02g06320.1 | 278 | 279 |
| O. sativa_Os09g0531200 | 280 | 281 |
| P. trichocarpa_scaff_87.31 | 282 | 283 |
| P. trichocarpa_scaff_II.817 | 284 | 285 |
| S. bicolor_5266778 | 286 | 287 |
| V. vinifera_GSVIVT00015323001 | 288 | 289 |
| A. thaliana_AT5G07290.1 | 290 | 291 |
| A. thaliana_AT5G61960.1 | 292 | 293 |
| G. max_Gm0065x00476 | 294 | 295 |
| G. max_Gm0078x00192 | 296 | 297 |
| H. vulgare_TA34301_4513 | 298 | 299 |
| M. truncatula_AC146333_33.4 | 300 | 301 |
| P. trichocarpa_554690 | 302 | 303 |
| P. trichocarpa_scaff_XV.852 | 304 | 305 |
| S. bicolor_5284361 | 306 | 307 |
| S. bicolor_5286306 | 308 | 309 |
| S. bicolor_5289097 | 310 | 311 |
| S. lycopersicum_TA39694_4081 | 312 | 313 |
| O. sativa_LOC_Os05g01240.1 | 314 | 315 |
| O. sativa_Os02g0517531 | 316 | 317 |
| V. vinifera_GSVIVT00018040001 | 318 | 319 |
| A. thaliana_AT1G29400.1 | 320 | 321 |
| A. thaliana_AT2G42890.1 | 322 | 323 |
| A. thaliana_AT4G18120.1 | 324 | 325 |
| B. napus_BN06MC34415_BNP4303_30@34259 | 326 | 327 |
| C. unshiu_TA918_55188 | 328 | 329 |
| G. max_Gm0227x00022 | 330 | 331 |
| M. truncatula_AC158464_2.5 | 332 | 333 |
| O. sativa_Os02g0319100 | 334 | 335 |
| O. sativa_Os02g0719800 | 336 | 337 |
| P. patens_129731 | 338 | 339 |
| P. trichocarpa_scaff_II.563 | 340 | 341 |
| P. trichocarpa_scaff_V.1088 | 342 | 343 |
| S. bicolor_5290305 | 344 | 345 |
| S. lycopersicum_TA40929_4081 | 346 | 347 |
| S. moellendorffii_440826 | 348 | 349 |
| T. aestivum_TA72898_4565 | 350 | 351 |
| V. vinifera_GSVIVT00003386001 | 352 | 353 |
| V. vinifera_GSVIVT00018912001 | 354 | 355 |
| C. reinhardtii_152680 | 356 | 357 |
| Chlorella_139357 | 358 | 359 |
| O. taurii_32802 | 360 | 361 |
| S. moellendorffii_406603 | 362 | 363 |
| S. moellendorffii_438348 | 364 | 365 |
| S. moellendorffii_75352 | 366 | 367 |
| V. carteri_98760 | 368 | 369 |

[0481] In some instances, related sequences have tentatively been assembled and publicly disclosed by research institutions, such as The Institute for Genomic Research (TIGR; beginning with TA). The Eukaryotic Gene Orthologs (EGO) database may be used to identify such related sequences, either by keyword search or by using the BLAST algorithm with the nucleic acid sequence or polypeptide sequence of interest. On other instances, special nucleic acid sequence databases have been created for particular organisms, such as by the Joint Genome Institute. Further, access to proprietary databases, has allowed the identification of novel nucleic acid and polypeptide sequences.

### 1.4. WOX1-Like Polypeptides

[0482] Sequences (full length cDNA, ESTs or genomic) related to the nucleic acid sequence of SEQ ID NO: 373 were identified amongst those maintained in the Entrez Nucleotides database at the National Center for Biotechnology Information (NCBI) using database sequence search tools, such as the Basic Local Alignment Tool (BLAST) (Altschul et al. (1990) J. Mol. Biol. 215:403-410; and Altschul et al. (1997) Nucleic Acids Res. 25:3389-3402). The program was used to find regions of local similarity between sequences by comparing nucleic acid or polypeptide sequences to sequence databases and by calculating the statistical significance of matches. For example, the polypeptide encoded by the nucleic acid used in the present invention was used for the TBLASTN algorithm, with default settings and the filter to ignore low complexity sequences set off. The output of the analysis was viewed by pairwise comparison, and ranked according to the probability score (E-value), where the score reflect the probability that a particular alignment occurs by chance (the lower the E-value, the more significant the hit). In addition to E-values, comparisons were also scored by percentage identity. Percentage identity refers to the number of identical nucleotides (or amino acids) between the two compared nucleic acid (or polypeptide) sequences over a particular length. In some instances, the default parameters may be adjusted to modify the stringency of the search. For example the E-value may be increased to show less stringent matches. This way, short nearly exact matches may be identified.

[0483] Table A4 provides a list of nucleic acid sequences related to the nucleic acid sequence used in the methods of the present invention.

TABLE A4
Examples of WOX1-like polypeptide and nucleic acid sequences:

| | | Poly- |
|---|---|---|
| | Nucleotide | peptide |
| | SEQ | SEQ |
| Name | ID NO: | ID NO: |
| P. trichocarpa_scaff XV.393#1 | 373 | 374 |
| A. thaliana_AT5G59340.1#1 | 375 | 376 |
| A. thaliana_AT3G18010.1#1 | 377 | 378 |
| A. thaliana_AT2G28610.1#1 | 379 | 380 |
| A. thaliana_AT2G01500.1#1 | 381 | 382 |
| A. thaliana_AT1G46480.1#1 | 383 | 384 |
| A. thaliana_AT5G45980.1 | 385 | 386 |
| A. thaliana_AT3G11260.1 | 387 | 388 |
| A. thaliana_AT2G17950.1 | 389 | 390 |
| A. thaliana_AT5G05770.1 | 391 | 392 |
| G. max_GM06MC24781_sa57g11 | 393 | 394 |
| G. max_GM06MSst21d04.f_46812992 | 395 | 396 |
| G. max_GM06MC17272_59656723 | 397 | 398 |
| G. max_GM06MSsl04f09.f_46766696 | 399 | 400 |
| M. truncatula_CU326389 | 401 | 402 |
| M. truncatula_AC141864 14.4#1 | 403 | 404 |
| M. truncatula_CT009654 1.4#1 | 405 | 406 |
| M. truncatula_AC169182 12.5#1 | 407 | 408 |
| M. truncatula_AC148486 25.5#1 | 409 | 410 |
| M. truncatula_AC174277 34.4#1 | 411 | 412 |
| O. sativa_Os01g0840300#1 | 413 | 414 |
| O. sativa_Os01g0854500#1 | 415 | 416 |
| O. sativa_LOC_Os11g01130.1#1 | 417 | 418 |
| O. sativa_LOC_Os04g55590.1#1 | 419 | 420 |
| O. sativa_LOC_Os04g56780.1#1 | 421 | 422 |
| O. sativa_LOC_Os12g01120.1#1 | 423 | 424 |
| P. patens_TA29638_3218#1 | 425 | 426 |
| P. trichocarpa_scaff IX.1351#1 | 427 | 428 |
| P. trichocarpa_scaff 21516.1#1 | 429 | 430 |
| P. trichocarpa_scaff VII.1221#1 | 431 | 432 |
| P. trichocarpa_scaff 57.96#1 | 433 | 434 |
| P. trichocarpa_scaff XII.399#1 | 435 | 436 |
| P. trichocarpa_scaff 40.331#1 | 437 | 438 |
| S. lycopersicum_TA40681 4081#1 | 439 | 440 |
| S. lycopersicum_TA46913 4081#1 | 441 | 442 |
| S. bicolor_5271830#1 | 443 | 444 |
| S. bicolor_5271901#1 | 445 | 446 |
| S. bicolor_5274976#1 | 447 | 448 |
| TraitMillCDS_27368; CDS7423 | 449 | 450 |
| TraitMillCDS_10448; | 451 | 452 |
| TraitMillCDS_28399; | 453 | 454 |
| TraitMillCDS_20956; | 455 | 456 |
| Z. mays_ZM07MC21862 BFb0069D10@21802#1 | 457 | 458 |
| Z. mays_ZM07MC29697 BFb0012E08@29607#1 | 459 | 460 |
| Z. mays_ZM07MSbpsHQ 65443629.n00@46340#1 | 461 | 462 |
| Z. mays_ZM07MC33910 BFb0326G17@33808#1 | 463 | 464 |
| NM_001061012 Os05g0118000 put WOX3 | 465 | 466 |
| AM490243 Oryzanarrowsheath NS | 467 | 468 |
| NP_001044759.1 Os01g0840300 put WOX2 | 469 | 470 |

[0484] In some instances, related sequences have tentatively been assembled and publicly disclosed by research institutions, such as The Institute for Genomic Research (TIGR; beginning with TA). The Eukaryotic Gene Orthologs (EGO) database may be used to identify such related sequences, either by keyword search or by using the BLAST algorithm with the nucleic acid sequence or polypeptide sequence of interest. On other instances, special nucleic acid sequence databases have been created for particular organisms, such as by the Joint Genome Institute. Further, access to proprietary databases, has allowed the identification of novel nucleic acid and polypeptide sequences.

### Example 2

### Alignment of Sequences Related to the Polypeptide Sequences Used in the Methods of the Invention

### 2.1. HSF Polypeptides

[0485] Alignment of polypeptide sequences was performed using the ClustalW 2.0 algorithm of progressive alignment (Thompson et al. (1997) Nucleic Acids Res 25:4876-4882; Chenna et al. (2003). Nucleic Acids Res 31:3497-3500) with standard setting (slow alignment, similarity matrix: Gonnet (or Blosum 62 (if polypeptides are aligned), gap opening penalty 10, gap extension penalty: 0.2). Minor manual editing was done to further optimise the alignment. The HSFA5 polypeptides are aligned in FIG. 1.

[0486] A phylogenetic tree of HSF polypeptides of plant origin is reproduced from Koskill-Doring et al. 2007 (FIG. 2).

[0487] Alignment of polypeptide sequences was performed using the ClustalW 2.0 algorithm of progressive alignment (Thompson et al. (1997) Nucleic Acids Res 25:4876-4882; Chenna et al. (2003). Nucleic Acids Res 31:3497-3500) with standard setting (slow alignment, similarity matrix: Gonnet, gap opening penalty 10, gap extension penalty: 0.2). Minor manual editing was done to further optimise the alignment.

### 2.2. OPT4-Like Polypeptides

[0488] Alignment of polypeptide sequences was performed as described for FIG. 4 and a phylogenetic tree of OPT4-like polypeptides as shown in FIG. 5 was constructed as described in the Description of the Figures.

### 2.3. PLA2-Like Polypeptides

[0489] Alignment of polypeptide sequences was performed as described for FIG. 7 and a phylogenetic tree of PLA2-like polypeptides as shown in FIG. 8 was constructed as described in the Description of the Figures.

### 2.4. WOX1-Like Polypeptides

[0490] Alignment of polypeptide sequences was performed using the ClustalW 2.0 algorithm of progressive alignment (Thompson et al. (1997) Nucleic Acids Res 25:4876-4882; Chenna et al. (2003). Nucleic Acids Res 31:3497-3500) with standard setting (slow alignment, similarity matrix: Gonnet (or Blosum 62 (if polypeptides are aligned), gap opening penalty 10, gap extension penalty: 0.2). Minor manual editing was done to further optimise the alignment. The WOX1-like polypeptides are aligned in FIG. 10.

[0491] A phylogenetic tree of WOX1-like polypeptides (FIG. 11) was constructed using a neighbour-joining clustering algorithm as provided in the AlignX programme from the Vector NTI (Invitrogen).

### Example 3

### Calculation of Global Percentage Identity Between Polypeptide Sequences Useful in Performing the Methods of the Invention

### 3.1. HSF Polypeptides

[0492] Global percentages of similarity and identity between full length polypeptide sequences useful in performing the methods of the invention were determined using one of the methods available in the art, the MatGAT (Matrix Global Alignment Tool) software (BMC Bioinformatics. 2003 4:29. MatGAT: an application that generates similarity/identity matrices using protein or DNA sequences. Campanella J J, Bitincka L, Smalley J; software hosted by Ledion Bitincka). MatGAT software generates similarity/identity matrices for DNA or protein sequences without needing pre-alignment of the data. The program performs a series of pair-wise alignments using the Myers and Miller global alignment algorithm (with a gap opening penalty of 12, and a gap extension penalty of 2), calculates similarity and identity using for example Blosum 62 (for polypeptides), and then places the results in a distance matrix. Sequence similarity is shown in the bottom half of the dividing line and sequence identity is shown in the top half of the diagonal dividing line.

[0493] Parameters used in the comparison were:
[0494] Scoring matrix: Blosum62
[0495] First Gap: 12
[0496] Extending gap: 2

[0497] Results of the software analysis are shown in Table B for the global similarity and identity over the full length of the polypeptide sequences. Percentage identity is given above the diagonal in bold and percentage similarity is given below the diagonal (normal face).

[0498] The percentage identity between the HSFA5 polypeptide sequences useful in performing the methods of the invention can be as low as 33.1% amino acid identity compared to SEQ ID NO: 2.

TABLE B1
MatGAT results for global similarity and identity over the full length of the polypeptide sequences.

| | 1 | 2 | 3 | 4 | 5 | 6 | 7 | 8 | 9 | 10 | 11 | 12 |
|---|---|---|---|---|---|---|---|---|---|---|---|---|
| 1. A.thaliana_AT4G18880.1 | | 59 | 36 | 53 | 54 | 53 | 53 | 52 | 39 | 36 | 57 | 38 |
| 2. A.thaliana_AT5G45710.1 | 70 | | 34 | 50 | 50 | 51 | 51 | 49 | 41 | 34 | 53 | 38 |
| 3. ---2468 | 55 | 50 | | 37 | 37 | 37 | 38 | 36 | 41 | 100 | 37 | 37 |
| 4. G.max_Gm0003x00186 | 72 | 65 | 55 | | 95 | 69 | 69 | 76 | 41 | 37 | 66 | 39 |
| 5. G.max_Gm0022x00353 | 74 | 65 | 55 | 99 | | 67 | 67 | 74 | 42 | 37 | 65 | 40 |
| 6. G.max_Gm0030x00291 | 72 | 68 | 55 | 83 | 82 | | 94 | 63 | 40 | 37 | 60 | 40 |
| 7. G.max_Gm0070x00147 | 73 | 67 | 54 | 84 | 83 | 97 | | 62 | 41 | 38 | 61 | 41 |
| 8. M.truncatula_AC152407_1.4 | 70 | 64 | 53 | 86 | 85 | 79 | 79 | | 39 | 36 | 61 | 36 |
| 9. O.sativa_LOC_Os01g54550.1 | 61 | 57 | 61 | 59 | 59 | 60 | 59 | 57 | | 41 | 42 | 41 |
| 10. O.sativa_LOC_Os05g45410.1 | 55 | 50 | 100 | 55 | 55 | 55 | 54 | 53 | 61 | | 37 | 37 |
| 11. P.trichocarpa_scaff_XI.679 | 75 | 67 | 56 | 81 | 81 | 78 | 78 | 78 | 62 | 56 | | 42 |
| 12. P.trichocarpa_scaff_XIV.882 | 60 | 55 | 58 | 60 | 61 | 59 | 59 | 59 | 61 | 58 | 63 | |
| 13. S.lycopersicum_TA44843_4081 | 69 | 64 | 52 | 74 | 75 | 73 | 72 | 72 | 60 | 52 | 77 | 59 |
| 14. S.lycopersicum_TA47501_4081 | 61 | 60 | 54 | 61 | 60 | 62 | 60 | 62 | 56 | 54 | 62 | 61 |
| 15. A.thaliana_AT4G13980.1 | 51 | 46 | 51 | 51 | 51 | 51 | 51 | 52 | 55 | 51 | 52 | 52 |
| 16. ---4957@1 | 52 | 44 | 52 | 50 | 49 | 50 | 50 | 51 | 49 | 52 | 50 | 50 |
| 17. G.max_Gm0003x00291 | 49 | 45 | 53 | 52 | 50 | 51 | 51 | 53 | 53 | 53 | 51 | 53 |
| 18. G.max_Gm0022x00445 | 51 | 45 | 53 | 51 | 50 | 52 | 51 | 53 | 52 | 53 | 52 | 55 |
| 19. M.truncatula_AC146585_2.5 | 52 | 44 | 52 | 50 | 49 | 50 | 50 | 51 | 49 | 52 | 50 | 50 |
| 20. M.truncatula_AC187466_52.4 | 50 | 45 | 50 | 48 | 47 | 47 | 49 | 47 | 49 | 50 | 50 | 50 |
| 21. O.sativa_LOC_Os02g29340.1 | 49 | 47 | 52 | 51 | 51 | 50 | 49 | 50 | 52 | 52 | 51 | 51 |
| 22. P.trichocarpa_scaff_88.24 | 51 | 44 | 53 | 51 | 51 | 53 | 52 | 51 | 52 | 53 | 50 | 52 |
| 23. P.trichocarpa_scaff_I.2223 | 49 | 44 | 54 | 50 | 50 | 51 | 51 | 51 | 53 | 54 | 50 | 52 |

| | 13 | 14 | 15 | 16 | 17 | 18 | 19 | 20 | 21 | 22 | 23 |
|---|---|---|---|---|---|---|---|---|---|---|---|
| 1. A.thaliana_AT4G18880.1 | 47.7 | 39.9 | 33.7 | 32.7 | 30.5 | 30.8 | 32.7 | 30.6 | 32.2 | 33 | 32 |
| 2. A.thaliana_AT5G45710.1 | 44 | 42 | 31.9 | 29.9 | 30.2 | 29.5 | 29.9 | 29 | 31.7 | 30 | 31 |
| 3. ---2468 | 36.1 | 36.2 | 33.2 | 34.8 | 33 | 32.8 | 34.8 | 30.6 | 36.8 | 31 | 34 |
| 4. G.max_Gm0003x00186 | 51.4 | 41.6 | 32 | 32.8 | 32.3 | 32.7 | 32.8 | 32.1 | 34.1 | 33 | 34 |
| 5. G.max_Gm0022x00353 | 53.1 | 40.4 | 32.1 | 31.6 | 32 | 32 | 31.6 | 32 | 34.2 | 33 | 34 |
| 6. G.max_Gm0030x00291 | 52.2 | 42.5 | 34 | 36 | 34.9 | 37.5 | 36 | 31 | 34.8 | 35 | 34 |
| 7. G.max_Gm0070x00147 | 51.2 | 41.4 | 35.1 | 35.2 | 35.2 | 35.2 | 35.2 | 31.3 | 34.6 | 35 | 34 |
| 8. M.truncatula_AC152407_1.4 | 50.9 | 42 | 33.1 | 33.7 | 34.7 | 34 | 33.7 | 32.3 | 33.3 | 34 | 34 |
| 9. O.sativa_LOC_Os01g54550.1 | 39.6 | 39.8 | 33.7 | 33.9 | 34.7 | 35.3 | 33.9 | 30.1 | 35.8 | 35 | 36 |
| 10. O.sativa_LOC_Os05g45410.1 | 36.1 | 36.2 | 33.2 | 34.8 | 33 | 32.8 | 34.8 | 30.6 | 36.8 | 31 | 34 |
| 11. P.trichocarpa_scaff_XI.679 | 58.6 | 40.7 | 34.5 | 33 | 32.9 | 33.4 | 33 | 29.8 | 34.1 | 33 | 35 |
| 12. P.trichocarpa_scaff_XIV.882 | 39.3 | 44 | 30.5 | 32.9 | 32.2 | 32.9 | 32.9 | 29.7 | 34.5 | 33 | 31 |
| 13. S.lycopersicum_TA44843_4081 | | 40 | 34.4 | 33.7 | 35.2 | 34.7 | 33.7 | 31.5 | 33.1 | 34 | 35 |
| 14. S.lycopersicum_TA47501_4081 | 60.8 | | 31.2 | 33.1 | 33.6 | 34.5 | 33.1 | 30 | 34.1 | 33 | 33 |
| 15. A.thaliana_AT4G13980.1 | 51.1 | 50 | | 52.4 | 55.1 | 55.1 | 52.4 | 43.9 | 47.7 | 56 | 58 |
| 16. ---4957@1 | 50.9 | 49.7 | 67.8 | | 73.4 | 74.4 | 100 | 66.4 | 44.5 | 58 | 59 |
| 17. G.max_Gm0003x00291 | 50.9 | 49.3 | 73.5 | 83.2 | | 95.8 | 73.4 | 62.8 | 47.2 | 66 | 66 |
| 18. G.max_Gm0022x00445 | 50.7 | 49.9 | 73.2 | 83.4 | 97.9 | | 74.4 | 63.2 | 46.5 | 66 | 65 |
| 19. M.truncatula_AC146585_2.5 | 50.9 | 49.7 | 67.8 | 100 | 83.2 | 83.4 | | 66.4 | 44.5 | 58 | 59 |
| 20. M.truncatula_AC187466_52.4 | 48.7 | 47.4 | 61.4 | 78.6 | 75.8 | 76.3 | 78.6 | | 38.4 | 49 | 52 |
| 21. O.sativa_LOC_Os02g29340.1 | 49.1 | 49.5 | 64.2 | 62.6 | 67 | 67.3 | 62.6 | 60 | | 47 | 48 |
| 22. P.trichocarpa_scaff_88.24 | 48.5 | 50.7 | 72.6 | 72.5 | 80 | 79.6 | 72.5 | 67.6 | 66 | | 86 |
| 23. P.trichocarpa_scaff_I.2223 | 49.6 | 49.2 | 73.5 | 73.9 | 81 | 80.4 | 73.9 | 69.6 | 66.1 | 91 | |

### 3.2. OPT4-Like Polypeptides

[0499] Global percentages of similarity and identity between full length OPT4-like polypeptide sequences is determined using MatGAT (Matrix Global Alignment Tool) software (BMC Bioinformatics. 2003 4:29. MatGAT: an application that generates similarity/identity matrices using protein or DNA sequences. Campanella J J, Bitincka L, Smalley J; software hosted by Ledion Bitincka). MatGAT software generates similarity/identity matrices for DNA or protein sequences without needing pre-alignment of the data. The program performs a series of pair-wise alignments using the Myers and Miller global alignment algorithm (with a gap opening penalty of 12, and a gap extension penalty of 2), calculates similarity and identity using for example Blosum 62 (for polypeptides), and then places the results in a distance matrix.

[0500] Parameters used in the comparison are:
[0501] Scoring matrix: Blosum62
[0502] First Gap: 12
[0503] Extending gap: 2

[0504] A MATGAT table for local alignment of a specific domain, or data on % identity/similarity between specific domains is also performed.

### 3.3. PLA2-Like Polypeptides

[0505] Global percentages of similarity and identity between full length PLA2-like polypeptide sequences is determined using MatGAT (Matrix Global Alignment Tool) software (BMC Bioinformatics. 2003 4:29. MatGAT: an application that generates similarity/identity matrices using protein or DNA sequences. Campanella J J, Bitincka L, Smalley J; software hosted by Ledion Bitincka). MatGAT software generates similarity/identity matrices for DNA or protein sequences without needing pre-alignment of the data. The program performs a series of pair-wise alignments using the Myers and Miller global alignment algorithm (with a gap opening penalty of 12, and a gap extension penalty of 2), calculates similarity and identity using for example Blosum 62 (for polypeptides), and then places the results in a distance matrix.

[0506] Parameters used in the comparison are:
[0507] Scoring matrix: Blosum62
[0508] First Gap: 12
[0509] Extending gap: 2

[0510] A MATGAT table for local alignment of a specific domain, or data on % identity/similarity between specific domains is also performed.

### 3.4. WOX1-Like Polypeptides

[0511] Global percentages of similarity and identity between full length WOX1-like polypeptide sequences is determined using MatGAT (Matrix Global Alignment Tool) software (BMC Bioinformatics. 2003 4:29. MatGAT: an application that generates similarity/identity matrices using protein or DNA sequences. Campanella J J, Bitincka L, Smalley J; software hosted by Ledion Bitincka). MatGAT software generates similarity/identity matrices for DNA or protein sequences without needing pre-alignment of the data. The program performs a series of pair-wise alignments using the Myers and Miller global alignment algorithm (with a gap opening penalty of 12, and a gap extension penalty of 2), calculates similarity and identity using for example Blosum 62 (for polypeptides), and then places the results in a distance matrix. Sequence similarity is shown in the bottom half of the dividing line and sequence identity is shown in the top half of the diagonal dividing line.

[0512] Parameters used in the comparison are:
[0513] Scoring matrix: Blosum62
[0514] First Gap: 12
[0515] Extending gap: 2

[0516] A MATGAT table for local alignment of a specific domain, or data on % identity/similarity between specific domains is also performed.

### Example 4

### Identification of Domains Comprised in Polypeptide Sequences Useful in Performing the Methods of the Invention

### 4.1. HSF Polypeptides

[0517] The Integrated Resource of Protein Families, Domains and Sites (InterPro) database is an integrated interface for the commonly used signature databases for text- and sequence-based searches. The InterPro database combines these databases, which use different methodologies and varying degrees of biological information about well-characterized proteins to derive protein signatures. Collaborating databases include SWISS-PROT, PROSITE, TrEMBL, PRINTS, ProDom and Pfam, Smart and TIGRFAMs. Pfam is a large collection of multiple sequence alignments and hidden Markov models covering many common protein domains and families. Pfam is hosted at the Sanger Institute server in the United Kingdom. Interpro is hosted at the European Bioinformatics Institute in the United Kingdom.

[0518] The SEQ ID NO: 2 polypeptide is scanned under InterPro in search of conserved domains.

### 4.2. OPT4-Like Polypeptides

[0519] The Integrated Resource of Protein Families, Domains and Sites (InterPro) database is an integrated interface for the commonly used signature databases for text- and sequence-based searches. The InterPro database combines these databases, which use different methodologies and varying degrees of biological information about well-characterized proteins to derive protein signatures. Collaborating databases include SWISS-PROT, PROSITE, TrEMBL, PRINTS, ProDom and Pfam, Smart and TIGRFAMs. Pfam is a large collection of multiple sequence alignments and hidden Markov models covering many common protein domains and families. Pfam is hosted at the Sanger Institute server in the United Kingdom. Interpro is hosted at the European Bioinformatics Institute in the United Kingdom.

[0520] The results of the InterPro scan of the polypeptide sequence as represented by SEQ ID NO: 156 are presented in Table C1.

TABLE C1
InterPro scan results (major accession numbers) of the
polypeptide sequence as represented by SEQ ID NO: 156.

| | | | |
|---|---|---|---|
| InterPro | IPR004648 | Tetrapeptide | |
| | | transporter, | |
| | | OPT1/isp4 | |
| TIGRFAMs | TIGR00727 | ISP4_OPT: small | 6.1e−174 [10-700]T |
| | | oligopeptide | |
| | | transporter | |
| InterPro | IPR004813 | Oligopeptide | |
| | | transporter OPT | |
| | | superfamily | |
| PFAM | PF03169 | OPT | 5.9e−252 [32-693]T |
| TIGRFAMs | TIGR00728 | OPT_sfam: | 2.5e−188 [16-695]T |
| | | oligopeptide | |
| | | transporters | |
| | | unintegrated | |
| PANTHER | PTHR22601 | ISP4 LIKE | 1.3e−158 [333-728]T |
| | | PROTEIN | |

### 4.3. PLA2-Like Polypeptides

[0521] The Integrated Resource of Protein Families, Domains and Sites (InterPro) database is an integrated interface for the commonly used signature databases for text- and sequence-based searches. The InterPro database combines these databases, which use different methodologies and varying degrees of biological information about well-characterized proteins to derive protein signatures. Collaborating databases include SWISS-PROT, PROSITE, TrEMBL, PRINTS, ProDom and Pfam, Smart and TIGRFAMs. Pfam is a large collection of multiple sequence alignments and hidden Markov models covering many common protein domains and families. Pfam is hosted at the Sanger Institute server in the United Kingdom. Interpro is hosted at the European Bioinformatics Institute in the United Kingdom.

[0522] The results of the InterPro scan of the polypeptide sequence as represented by SEQ ID NO: 253 are presented in Table C2.

TABLE C2
InterPro scan results (major accession numbers) of the
polypeptide sequence as represented by SEQ ID NO: 253.

| | | Short | |
|---|---|---|---|
| | | Name | |
| method | Acc Number | location | location |
| IPR007201 | RNA recognition motif 2 | | |
| PFAM | PF04059 | RRM_2 | 1.1e−41 [193-303]T |

### 4.4. WOX1-Like Polypeptides

[0523] The Integrated Resource of Protein Families, Domains and Sites (InterPro) database is an integrated interface for the commonly used signature databases for text- and sequence-based searches. The InterPro database combines these databases, which use different methodologies and varying degrees of biological information about well-characterized proteins to derive protein signatures. Collaborating databases include SWISS-PROT, PROSITE, TrEMBL, PRINTS, ProDom and Pfam, Smart and TIGRFAMs. Pfam is a large collection of multiple sequence alignments and hidden Markov models covering many common protein domains and families. Pfam is hosted at the Sanger Institute server in the United Kingdom. Interpro is hosted at the European Bioinformatics Institute in the United Kingdom.

### Example 5

### Topology Prediction of the Polypeptide Sequences Useful in Performing the Methods of the Invention

### 5.1. HSF Polypeptides

[0524] TargetP 1.1 predicts the subcellular location of eukaryotic proteins. The location assignment is based on the predicted presence of any of the N-terminal pre-sequences: chloroplast transit peptide (cTP), mitochondrial targeting peptide (mTP) or secretory pathway signal peptide (SP). Scores on which the final prediction is based are not really probabilities, and they do not necessarily add to one. However, the location with the highest score is the most likely according to TargetP, and the relationship between the scores (the reliability class) may be an indication of how certain the prediction is. The reliability class (RC) ranges from 1 to 5, where 1 indicates the strongest prediction. TargetP is maintained at the server of the Technical University of Denmark.

[0525] For the sequences predicted to contain an N-terminal presequence a potential cleavage site can also be predicted.

[0526] A number of parameters are selected, such as organism group (non-plant or plant), cutoff sets (none, predefined set of cutoffs, or user-specified set of cutoffs), and the calculation of prediction of cleavage sites (yes or no). For example, the “plant” organism group is selected, no cutoffs defined, and the predicted length of the transit peptide requested. The subcellular localization of the polypeptide sequence as represented by SEQ ID NO: 2 may be the cytoplasm or nucleus, no transit peptide is predicted.

[0527] Many other algorithms can be used to perform such analyses, including:
[0528] ChloroP 1.1 hosted on the server of the Technical University of Denmark;
[0529] Protein Prowler Subcellular Localisation Predictor version 1.2 hosted on the server of the Institute for Molecular Bioscience, University of Queensland, Brisbane, Australia;
[0530] PENCE Proteome Analyst PA-GOSUB 2.5 hosted on the server of the University of Alberta, Edmonton, Alberta, Canada;
[0531] TMHMM, hosted on the server of the Technical University of Denmark
[0532] PSORT (URL: psort.org)
[0533] PLOC (Park and Kanehisa, Bioinformatics, 19, 1656-1663, 2003).

### 5.2. OPT4-Like Polypeptides

[0534] TargetP 1.1 predicts the subcellular location of eukaryotic proteins. The location assignment is based on the predicted presence of any of the N-terminal pre-sequences: chloroplast transit peptide (cTP), mitochondrial targeting peptide (mTP) or secretory pathway signal peptide (SP). Scores on which the final prediction is based are not really probabilities, and they do not necessarily add to one. However, the location with the highest score is the most likely according to TargetP, and the relationship between the scores (the reliability class) may be an indication of how certain the prediction is. The reliability class (RC) ranges from 1 to 5, where 1 indicates the strongest prediction. TargetP is maintained at the server of the Technical University of Denmark.

[0535] For the sequences predicted to contain an N-terminal pre-sequence a potential cleavage site can also be predicted.

[0536] A number of parameters are selected, such as organism group (non-plant or plant), cutoff sets (none, predefined set of cutoffs, or user-specified set of cutoffs), and the calculation of prediction of cleavage sites (yes or no).

[0537] Many other algorithms can be used to perform such analyses, including:
[0538] ChloroP 1.1 hosted on the server of the Technical University of Denmark;
[0539] Protein Prowler Subcellular Localisation Predictor version 1.2 hosted on the server of the Institute for Molecular Bioscience, University of Queensland, Brisbane, Australia;
[0540] PENCE Proteome Analyst PA-GOSUB 2.5 hosted on the server of the University of Alberta, Edmonton, Alberta, Canada;
[0541] TMHMM, hosted on the server of the Technical University of Denmark
[0542] PSORT (URL: psort.org)
[0543] PLOC (Park and Kanehisa, Bioinformatics, 19, 1656-1663, 2003).

### 5.3. PLA2-Like Polypeptides

[0544] TargetP 1.1 predicts the subcellular location of eukaryotic proteins. The location assignment is based on the predicted presence of any of the N-terminal pre-sequences: chloroplast transit peptide (cTP), mitochondrial targeting peptide (mTP) or secretory pathway signal peptide (SP). Scores on which the final prediction is based are not really probabilities, and they do not necessarily add to one. However, the location with the highest score is the most likely according to TargetP, and the relationship between the scores (the reliability class) may be an indication of how certain the prediction is. The reliability class (RC) ranges from 1 to 5, where 1 indicates the strongest prediction. TargetP is maintained at the server of the Technical University of Denmark.

[0545] For the sequences predicted to contain an N-terminal presequence a potential cleavage site can also be predicted.

[0546] A number of parameters are selected, such as organism group (non-plant or plant), cutoff sets (none, predefined set of cutoffs, or user-specified set of cutoffs), and the calculation of prediction of cleavage sites (yes or no).

[0547] Many other algorithms can be used to perform such analyses, including:
[0548] ChloroP 1.1 hosted on the server of the Technical University of Denmark;
[0549] Protein Prowler Subcellular Localisation Predictor version 1.2 hosted on the server of the Institute for Molecular Bioscience, University of Queensland, Brisbane, Australia;
[0550] PENCE Proteome Analyst PA-GOSUB 2.5 hosted on the server of the University of Alberta, Edmonton, Alberta, Canada;
[0551] TMHMM, hosted on the server of the Technical University of Denmark
[0552] PSORT (URL: psort.org)
[0553] PLOC (Park and Kanehisa, Bioinformatics, 19, 1656-1663, 2003).

### 5.4. WOX1-Like Polypeptides

[0554] TargetP 1.1 predicts the subcellular location of eukaryotic proteins. The location assignment is based on the predicted presence of any of the N-terminal pre-sequences: chloroplast transit peptide (cTP), mitochondrial targeting peptide (mTP) or secretory pathway signal peptide (SP). Scores on which the final prediction is based are not really probabilities, and they do not necessarily add to one. However, the location with the highest score is the most likely according to TargetP, and the relationship between the scores (the reliability class) may be an indication of how certain the prediction is. The reliability class (RC) ranges from 1 to 5, where 1 indicates the strongest prediction. TargetP is maintained at the server of the Technical University of Denmark.

[0555] For the sequences predicted to contain an N-terminal presequence a potential cleavage site can also be predicted.

[0556] A number of parameters are selected, such as organism group (non-plant or plant), cutoff sets (none, predefined set of cutoffs, or user-specified set of cutoffs), and the calculation of prediction of cleavage sites (yes or no).

[0557] Many other algorithms can be used to perform such analyses, including:
[0558] ChloroP 1.1 hosted on the server of the Technical University of Denmark;
[0559] Protein Prowler Subcellular Localisation Predictor version 1.2 hosted on the server of the Institute for Molecular Bioscience, University of Queensland, Brisbane, Australia;
[0560] PENCE Proteome Analyst PA-GOSUB 2.5 hosted on the server of the University of Alberta, Edmonton, Alberta, Canada;
[0561] TMHMM, hosted on the server of the Technical University of Denmark
[0562] PSORT (URL: psort.org)
[0563] PLOC (Park and Kanehisa, Bioinformatics, 19, 1656-1663, 2003).

### Example 6

### Assay Related to the Polypeptide Sequences Useful in Performing the Methods of the Invention

### 6.1. HSF Polypeptides

[0564] The activity of the HSFA5 polypeptide as represented by SEQ ID NO: 2 maybe determined essentially as defined by Baniwal et al. 2007. Briefly, the binding of the HSFA5 polypeptide to a DNA molecule is assayed by using a repressor reporter assay in vivo, for example in protoplasts. The repressor reporter contains multiple Hsf binding sites immediately downstream of the TATA box of the cauliflower mosaic virus 35S promoter. Binding blocks the function of the 35S promoter and thus diminishes transcription of the reporter GUS gene. The GUS activity is monitored using standard methods.

### 6.2. OPT4-Like Polypeptides

[0565] Osawa et al., (. Biochem J. 2006 Jan. 1; 393(Pt 1):267-75.) provide an assay for OPT4-like activity.

### Example 7

### Cloning of the Nucleic Acid Sequence Used in the Methods of the Invention

### 7.1. HSF Polypeptides

[0566] The nucleic acid sequence used in the methods of the invention was amplified by PCR using as template a custom-made Medicago truncatula seedlings cDNA library (in pCMV Sport 6.0; Invitrogen, Paisley, UK). PCR was performed using Hifi Taq DNA polymerase in standard conditions, using 200 ng of template in a 50 μl PCR mix. The primers used were 5-ggggacaagtttgtacaaaaaagcaggcttaaacaatgaattctgcaccacaatcc-3′ (SEQ ID NO: 152; sense) and 5′-ggggaccactttgtacaagaaagctgggtagacagcatgctcaaaggg-3′ (SEQ ID NO: 153; reverse, complementary) which include the AttB sites for Gateway recombination. The amplified PCR fragment was purified also using standard methods. The first step of the Gateway procedure, the BP reaction, was then performed, during which the PCR fragment recombined in vivo with the pDONR201 plasmid to produce, according to the Gateway terminology, an “entry clone”, p HSFA5. Plasmid pDONR201 was purchased from Invitrogen, as part of the Gateway® technology.

[0567] The entry clone comprising SEQ ID NO: 1 was then used in an LR reaction with a destination vector used for Oryza sativa transformation. This vector contained as functional elements within the T-DNA borders: a plant selectable marker; a screenable marker expression cassette; and a Gateway cassette intended for LR in vivo recombination with the nucleic acid sequence of interest already cloned in the entry clone. A rice GOS2 promoter (SEQ ID NO: 154) for constitutive specific expression was located upstream of this Gateway cassette.

[0568] After the LR recombination step, the resulting expression vector pGOS2::HSFA5 (FIG. 3) was transformed into Agrobacterium strain LBA4044 according to methods well known in the art.

### 7.2. OPT4-Like Polypeptides

[0569] The nucleic acid sequence used in the methods of the invention was amplified by PCR using as template a custom-made Arabidopsis thaliana seedlings cDNA library (in pCMV Sport 6.0; Invitrogen, Paisley, UK). PCR was performed using Hifi Taq DNA polymerase in standard conditions, using 200 ng of template in a 50 μl PCR mix. The primers used were prm09267 (SEQ ID NO: 250; sense, start codon in bold): 5′-ggggacaagtttgtacaaaaaagcaggc ttaaacaatggccaccgccgac-3′ and prm09268 (SEQ ID NO: 251; reverse, complementary): 5′-ggggaccactttgtacaagaaagctgggtcacaccaatggatcctttaagat-3′, which include the AttB sites for Gateway recombination. The amplified PCR fragment was purified also using standard methods. The first step of the Gateway procedure, the BP reaction, was then performed, during which the PCR fragment recombined in vivo with the pDONR201 plasmid to produce, according to the Gateway terminology, an “entry clone”, pOPT4-LIKE. Plasmid pDONR201 was purchased from Invitrogen, as part of the Gateway® technology.

[0570] The entry clone comprising SEQ ID NO: 155 was then used in an LR reaction with a destination vector used for Oryza sativa transformation. This vector contained as functional elements within the T-DNA borders: a plant selectable marker; a screenable marker expression cassette; and a Gateway cassette intended for LR in vivo recombination with the nucleic acid sequence of interest already cloned in the entry clone. A rice GOS2 promoter (SEQ ID NO: 249) for constitutive specific expression was located upstream of this Gateway cassette.

[0571] After the LR recombination step, the resulting expression vector pGOS2::OPT4-LIKE (FIG. 6) was transformed into Agrobacterium strain LBA4044 according to methods well known in the art.

### 7.3. PLA2-Like Polypeptides

[0572] The nucleic acid sequence used in the methods of the invention was amplified by PCR using as template a populus trichocarpa cDNA library (in pCMV Sport 6.0; Invitrogen, Paisley, UK). PCR was performed using Hifi Taq DNA polymerase in standard conditions, using 200 ng of template in a 50 μl PCR mix. The primers used were prm12472 (SEQ ID NO: 371; sense, start codon in bold): 5′-ggggacaagtttgtacaaaaaagcaggcttaaacaa tgaatggaaaggaaatttac-3′ and prm12472 (SEQ ID NO: 372; reverse, complementary): 5′-ggggaccactttgtacaagaaa gctgggtactcctatcgtctagttgctg-3′, which include the AttB sites for Gateway recombination. The amplified PCR fragment was purified also using standard methods. The first step of the Gateway procedure, the BP reaction, was then performed, during which the PCR fragment recombined in vivo with the pDONR201 plasmid to produce, according to the Gateway terminology, an “entry clone”, pPLA2-LIKE. Plasmid pDONR201 was purchased from Invitrogen, as part of the Gateway® technology.

[0573] The entry clone comprising SEQ ID NO: 252 was then used in an LR reaction with a destination vector used for Oryza sativa transformation. This vector contained as functional elements within the T-DNA borders: a plant selectable marker; a screenable marker expression cassette; and a Gateway cassette intended for LR in vivo recombination with the nucleic acid sequence of interest already cloned in the entry clone. A rice GOS2 promoter (SEQ ID NO: 370) for constitutive specific expression was located upstream of this Gateway cassette.

[0574] After the LR recombination step, the resulting expression vector pGOS2::PLA2-LIKE (FIG. 9) was transformed into Agrobacterium strain LBA4044 according to methods well known in the art.

[0575] 7.4. WOX1-Like Polypeptides

[0576] The nucleic acid sequence used in the methods of the invention was amplified by PCR using as template a populus cDNA library (in pCMV Sport 6.0; Invitrogen, Paisley, UK). PCR was performed using Hifi Taq DNA polymerase in standard conditions, using 200 ng of template in a 50 μl PCR mix. The primers used were prm11930 (SEQ ID NO: 478; sense, start codon in bold): 5′-ggggacaagtttgtacaaaaaagcaggcttaaacaatgtggatgatgggttataat-3′ and prm 11931 (SEQ ID NO: 479; reverse, complementary): 5′-ggggaccactttgtacaagaaagctgggt ctttggatggtcatcattagt-3′, which include the AttB sites for Gateway recombination. The amplified PCR fragment was purified also using standard methods. The first step of the Gateway procedure, the BP reaction, was then performed, during which the PCR fragment recombined in vivo with the pDONR201 plasmid to produce, according to the Gateway terminology, an “entry clone”, pWOX1-like. Plasmid pDONR201 was purchased from Invitrogen, as part of the Gateway® technology.

[0577] The entry clone comprising SEQ ID NO: 373 was then used in an LR reaction with a destination vector used for Oryza sativa transformation. This vector contained as functional elements within the T-DNA borders: a plant selectable marker; a screenable marker expression cassette; and a Gateway cassette intended for LR in vivo recombination with the nucleic acid sequence of interest already cloned in the entry clone. A rice GOS2 promoter (SEQ ID NO: 477) for constitutive specific expression was located upstream of this Gateway cassette.

[0578] After the LR recombination step, the resulting expression vector pGOS2::WOX1-like (FIG. 12) was transformed into Agrobacterium strain LBA4044 according to methods well known in the art.

### Example 8

### Plant Transformation

### Rice Transformation

[0579] The Agrobacterium containing the expression vector was used to transform Oryza sativa plants. Mature dry seeds of the rice japonica cultivar Nipponbare were dehusked. Sterilization was carried out by incubating for one minute in 70% ethanol, followed by 30 minutes in 0.2% HgCl₂, followed by a 6 times 15 minutes wash with sterile distilled water. The sterile seeds were then germinated on a medium containing 2,4-D (callus induction medium). After incubation in the dark for four weeks, embryogenic, scutellum-derived calli were excised and propagated on the same medium. After two weeks, the calli were multiplied or propagated by subculture on the same medium for another 2 weeks. Embryogenic callus pieces were sub-cultured on fresh medium 3 days before co-cultivation (to boost cell division activity).

[0580] Agrobacterium strain LBA4404 containing the expression vector was used for co-cultivation. Agrobacterium was inoculated on AB medium with the appropriate antibiotics and cultured for 3 days at 28° C. The bacteria were then collected and suspended in liquid co-cultivation medium to a density (OD₆₀₀) of about 1. The suspension was then transferred to a Petri dish and the calli immersed in the suspension for 15 minutes. The callus tissues were then blotted dry on a filter paper and transferred to solidified, co-cultivation medium and incubated for 3 days in the dark at 25° C. Co-cultivated calli were grown on 2,4-D-containing medium for 4 weeks in the dark at 28° C. in the presence of a selection agent. During this period, rapidly growing resistant callus islands developed. After transfer of this material to a regeneration medium and incubation in the light, the embryogenic potential was released and shoots developed in the next four to five weeks. Shoots were excised from the calli and incubated for 2 to 3 weeks on an auxin-containing medium from which they were transferred to soil. Hardened shoots were grown under high humidity and short days in a greenhouse.

[0581] Approximately 35 independent T0 rice transformants were generated for one construct. The primary transformants were transferred from a tissue culture chamber to a greenhouse. After a quantitative PCR analysis to verify copy number of the T-DNA insert, only single copy transgenic plants that exhibit tolerance to the selection agent were kept for harvest of T1 seed. Seeds were then harvested three to five months after transplanting. The method yielded single locus transformants at a rate of over 50% (Aldemita and Hodges 1996, Chan et al. 1993, Hiei et al. 1994).

### Example 9

### Transformation of Other Crops

### Corn Transformation

[0582] Transformation of maize (Zea mays) is performed with a modification of the method described by Ishida et al. (1996) Nature Biotech 14(6): 745-50. Transformation is genotype-dependent in corn and only specific genotypes are amenable to transformation and regeneration. The inbred line A188 (University of Minnesota) or hybrids with A188 as a parent are good sources of donor material for transformation, but other genotypes can be used successfully as well. Ears are harvested from corn plant approximately 11 days after pollination (DAP) when the length of the immature embryo is about 1 to 1.2 mm. Immature embryos are cocultivated with Agrobacterium tumefaciens containing the expression vector, and transgenic plants are recovered through organogenesis. Excised embryos are grown on callus induction medium, then maize regeneration medium, containing the selection agent (for example imidazolinone but various selection markers can be used). The Petri plates are incubated in the light at 25° C. for 2-3 weeks, or until shoots develop. The green shoots are transferred from each embryo to maize rooting medium and incubated at 25° C. for 2-3 weeks, until roots develop. The rooted shoots are transplanted to soil in the greenhouse. T1 seeds are produced from plants that exhibit tolerance to the selection agent and that contain a single copy of the T-DNA insert.

### Wheat Transformation

[0583] Transformation of wheat is performed with the method described by Ishida et al. (1996) Nature Biotech 14(6): 745-50. The cultivar Bobwhite (available from CIMMYT, Mexico) is commonly used in transformation. Immature embryos are co-cultivated with Agrobacterium tumefaciens containing the expression vector, and transgenic plants are recovered through organogenesis. After incubation with Agrobacterium, the embryos are grown in vitro on callus induction medium, then regeneration medium, containing the selection agent (for example imidazolinone but various selection markers can be used). The Petri plates are incubated in the light at 25° C. for 2-3 weeks, or until shoots develop. The green shoots are transferred from each embryo to rooting medium and incubated at 25° C. for 2-3 weeks, until roots develop. The rooted shoots are transplanted to soil in the greenhouse. T1 seeds are produced from plants that exhibit tolerance to the selection agent and that contain a single copy of the T-DNA insert.

### Soybean Transformation

[0584] Soybean is transformed according to a modification of the method described in the Texas A&M U.S. Pat. No. 5,164,310. Several commercial soybean varieties are amenable to transformation by this method. The cultivar Jack (available from the Illinois Seed foundation) is commonly used for transformation. Soybean seeds are sterilised for in vitro sowing. The hypocotyl, the radicle and one cotyledon are excised from seven-day old young seedlings. The epicotyl and the remaining cotyledon are further grown to develop axillary nodes. These axillary nodes are excised and incubated with Agrobacterium tumefaciens containing the expression vector. After the cocultivation treatment, the explants are washed and transferred to selection media. Regenerated shoots are excised and placed on a shoot elongation medium. Shoots no longer than 1 cm are placed on rooting medium until roots develop. The rooted shoots are transplanted to soil in the greenhouse. T1 seeds are produced from plants that exhibit tolerance to the selection agent and that contain a single copy of the T-DNA insert.

### Rapeseed/Canola Transformation

[0585] Cotyledonary petioles and hypocotyls of 5-6 day old young seedling are used as explants for tissue culture and transformed according to Babic et al. (1998, Plant Cell Rep 17: 183-188). The commercial cultivar Westar (Agriculture Canada) is the standard variety used for transformation, but other varieties can also be used. Canola seeds are surface-sterilized for in vitro sowing. The cotyledon petiole explants with the cotyledon attached are excised from the in vitro seedlings, and inoculated with Agrobacterium (containing the expression vector) by dipping the cut end of the petiole explant into the bacterial suspension. The explants are then cultured for 2 days on MSBAP-3 medium containing 3 mg/l BAP, 3% sucrose, 0.7% Phytagar at 23° C., 16 hr light. After two days of co-cultivation with Agrobacterium, the petiole explants are transferred to MSBAP-3 medium containing 3 mg/l BAP, cefotaxime, carbenicillin, or timentin (300 mg/l) for 7 days, and then cultured on MSBAP-3 medium with cefotaxime, carbenicillin, or timentin and selection agent until shoot regeneration. When the shoots are 5-10 mm in length, they are cut and transferred to shoot elongation medium (MSBAP-0.5, containing 0.5 mg/l BAP). Shoots of about 2 cm in length are transferred to the rooting medium (MS0) for root induction. The rooted shoots are transplanted to soil in the greenhouse. T1 seeds are produced from plants that exhibit tolerance to the selection agent and that contain a single copy of the T-DNA insert.

### Alfalfa Transformation

[0586] A regenerating clone of alfalfa (Medicago sativa) is transformed using the method of (McKersie et al., 1999 Plant Physiol 119: 839-847). Regeneration and transformation of alfalfa is genotype dependent and therefore a regenerating plant is required. Methods to obtain regenerating plants have been described. For example, these can be selected from the cultivar Rangelander (Agriculture Canada) or any other commercial alfalfa variety as described by Brown D C W and A Atanassov (1985. Plant Cell Tissue Organ Culture 4: 111-112). Alternatively, the RA3 variety (University of Wisconsin) has been selected for use in tissue culture (Walker et al., 1978 μm J Bot 65:654-659). Petiole explants are cocultivated with an overnight culture of Agrobacterium tumefaciens C58C1 pMP90 (McKersie et al., 1999 Plant Physiol 119: 839-847) or LBA4404 containing the expression vector. The explants are cocultivated for 3 d in the dark on SH induction medium containing 288 mg/L Pro, 53 mg/L thioproline, 4.35 g/L K2SO4, and 100 μm acetosyringinone. The explants are washed in half-strength Murashige-Skoog medium (Murashige and Skoog, 1962) and plated on the same SH induction medium without acetosyringinone but with a suitable selection agent and suitable antibiotic to inhibit Agrobacterium growth. After several weeks, somatic embryos are transferred to BOi2Y development medium containing no growth regulators, no antibiotics, and 50 g/L sucrose. Somatic embryos are subsequently germinated on half-strength Murashige-Skoog medium. Rooted seedlings were transplanted into pots and grown in a greenhouse. T1 seeds are produced from plants that exhibit tolerance to the selection agent and that contain a single copy of the T-DNA insert.

### Cotton Transformation

[0587] Cotton is transformed using Agrobacterium tumefaciens according to the method described in U.S. Pat. No. 5,159,135. Cotton seeds are surface sterilised in 3% sodium hypochlorite solution during 20 minutes and washed in distilled water with 500 μg/ml cefotaxime. The seeds are then transferred to SH-medium with 50 μg/ml benomyl for germination. Hypocotyls of 4 to 6 days old seedlings are removed, cut into 0.5 cm pieces and are placed on 0.8% agar. An Agrobacterium suspension (approx. 108 cells per ml, diluted from an overnight culture transformed with the gene of interest and suitable selection markers) is used for inoculation of the hypocotyl explants. After 3 days at room temperature and lighting, the tissues are transferred to a solid medium (1.6 g/l Gelrite) with Murashige and Skoog salts with B5 vitamins (Gamborg et al., Exp. Cell Res. 50:151-158 (1968)), 0.1 mg/l 2,4-D, 0.1 mg/l 6-furfurylaminopurine and 750 μg/ml MgCL2, and with 50 to 100 μg/ml cefotaxime and 400-500 μg/ml carbenicillin to kill residual bacteria. Individual cell lines are isolated after two to three months (with subcultures every four to six weeks) and are further cultivated on selective medium for tissue amplification (30° C., 16 hr photoperiod). Transformed tissues are subsequently further cultivated on non-selective medium during 2 to 3 months to give rise to somatic embryos. Healthy looking embryos of at least 4 mm length are transferred to tubes with SH medium in fine vermiculite, supplemented with 0.1 mg/l indole acetic acid, 6 furfurylaminopurine and gibberellic acid. The embryos are cultivated at 30° C. with a photoperiod of 16 hrs, and plantlets at the 2 to 3 leaf stage are transferred to pots with vermiculite and nutrients. The plants are hardened and subsequently moved to the greenhouse for further cultivation.

### Example 10

### Phenotypic Evaluation Procedure

### 10.1 Evaluation Setup

[0588] Approximately 35 independent T0 rice transformants were generated. The primary transformants were transferred from a tissue culture chamber to a greenhouse for growing and harvest of T1 seed. Events, of which the T1 progeny segregated 3:1 for presence/absence of the transgene, were retained. For each of these events, approximately 10 T1 seedlings containing the transgene (hetero- and homo-zygotes) and approximately 10 T1 seedlings lacking the transgene (nullizygotes) were selected by monitoring visual marker expression. The transgenic plants and the corresponding nullizygotes were grown side-by-side at random positions. Greenhouse conditions were of shorts days (12 hours light), 28° C. in the light and 22° C. in the dark, and a relative humidity of 70%. Plants grown under non-stress conditions were watered at regular intervals to ensure that water and nutrients were not limiting and to satisfy plant needs to complete growth and development.

[0589] T1 events were further evaluated in the T2 generation following the same evaluation procedure as for the T1 generation but with more individuals per event. From the stage of sowing until the stage of maturity the plants were passed several times through a digital imaging cabinet. At each time point digital images (2048×1536 pixels, 16 million colours) were taken of each plant from at least 6 different angles.

### Drought Screen

[0590] Plants from T2 seeds were grown in potting soil under normal conditions until they approached the heading stage. They were then transferred to a “dry” section where irrigation was withheld. Humidity probes were inserted in randomly chosen pots to monitor the soil water content (SWC). When SWC goes below certain thresholds, the plants were automatically re-watered continuously until a normal level was reached again. The plants were then re-transferred again to normal conditions. The rest of the cultivation (plant maturation, seed harvest) was the same as for plants not grown under abiotic stress conditions. Growth and yield parameters were recorded as detailed for growth under normal conditions.

### Nitrogen Use Efficiency Screen

[0591] Rice plants from T2 seeds were grown in potting soil under normal conditions except for the nutrient solution. The pots were watered from transplantation to maturation with a specific nutrient solution containing reduced N nitrogen (N) content, usually between 7 to 8 times less. The rest of the cultivation (plant maturation, seed harvest) was as for plants not grown under abiotic stress. Growth and yield parameters were recorded as detailed for growth under normal conditions.

### Salt Stress Screen

[0592] Plants are grown on a substrate made of coco fibers and argex (3 to 1 ratio). A normal nutrient solution is used during the first two weeks after transplanting the plantlets in the greenhouse. After the first two weeks, 25 mM of salt (NaCl) is added to the nutrient solution, until the plants are harvested. Seed-related parameters are then measured.

### 10.2 Statistical Analysis: F Test

[0593] A two factor ANOVA (analysis of variants) was used as a statistical model for the overall evaluation of plant phenotypic characteristics. An F test was carried out on all the parameters measured of all the plants of all the events transformed with the gene of the present invention. The F test was carried out to check for an effect of the gene over all the transformation events and to verify for an overall effect of the gene, also known as a global gene effect. The threshold for significance for a true global gene effect was set at a 5% probability level for the F test. A significant F test value points to a gene effect, meaning that it is not only the mere presence or position of the gene that is causing the differences in phenotype.

[0594] Because two experiments with overlapping events were carried out, a combined analysis was performed. This is useful to check consistency of the effects over the two experiments, and if this is the case, to accumulate evidence from both experiments in order to increase confidence in the conclusion. The method used was a mixed-model approach that takes into account the multilevel structure of the data (i.e. experiment-event-segregants). P values were obtained by comparing likelihood ratio test to chi square distributions.

### 10.3 Parameters Measured

[0595] Biomass-Related Parameter Measurement From the stage of sowing until the stage of maturity the plants were passed several times through a digital imaging cabinet. At each time point digital images (2048×1536 pixels, 16 million colours) were taken of each plant from at least 6 different angles.

[0596] The plant aboveground area (or leafy biomass) was determined by counting the total number of pixels on the digital images from aboveground plant parts discriminated from the background. This value was averaged for the pictures taken on the same time point from the different angles and was converted to a physical surface value expressed in square mm by calibration. Experiments show that the aboveground plant area measured this way correlates with the biomass of plant parts above ground. The above ground area is the area measured at the time point at which the plant had reached its maximal leafy biomass. The early vigour is the plant (seedling) aboveground area three weeks post-germination. Increase in root biomass is expressed as an increase in total root biomass (measured as maximum biomass of roots observed during the lifespan of a plant); or as an increase in the root/shoot index (measured as the ratio between root mass and shoot mass in the period of active growth of root and shoot).

[0597] Early vigour was determined by counting the total number of pixels from aboveground plant parts discriminated from the background. This value was averaged for the pictures taken on the same time point from different angles and was converted to a physical surface value expressed in square mm by calibration. The results described below are for plants three weeks post-germination.

### Seed-Related Parameter Measurements

[0598] The mature primary panicles were harvested, counted, bagged, barcode-labelled and then dried for three days in an oven at 37° C. The panicles were then threshed and all the seeds were collected and counted. The filled husks were separated from the empty ones using an air-blowing device. The empty husks were discarded and the remaining fraction was counted again. The filled husks were weighed on an analytical balance. The number of filled seeds was determined by counting the number of filled husks that remained after the separation step. The total seed yield was measured by weighing all filled husks harvested from a plant. Total seed number per plant was measured by counting the number of husks harvested from a plant. Thousand Kernel Weight (TKW) is extrapolated from the number of filled seeds counted and their total weight. The Harvest Index (HI) in the present invention is defined as the ratio between the total seed yield and the above ground area (mm²), multiplied by a factor 10⁶. The total number of flowers per panicle as defined in the present invention is the ratio between the total number of seeds and the number of mature primary panicles. The seed fill rate as defined in the present invention is the proportion (expressed as a %) of the number of filled seeds over the total number of seeds (or florets).

### Examples 11

### Results of the Phenotypic Evaluation of the Transgenic Plants

### 11.1. HSF Polypeptides

### GOS2::HSFA5

[0599] The results of the evaluation of transgenic rice plants in the T1 generation and expressing in the sense orientation under the control of the rice GOS2 promoter a nucleic acid comprising the longest Open Reading Frame in SEQ ID NO: 1 under the drought screen are presented below. See previous Examples for details on the generations of the transgenic plants. An increase was observed for total seed weight (totalwgseeds), number of filled seeds (nrfilledseed), seed fill rate (fillrate), harvest index (harvestindex) and thousand-kernel weight (Table D1).

TABLE D1

| | % increase in transgenic |
|---|---|
| | compared to control |
| Yield trait | plant |
| totalwgseeds | 30 |
| fillrate | 25 |
| harvestindex | 26 |
| nrfilledseed | 32 |

[0600] The results of the evaluation of transgenic rice plants in the T1 generation and expressing in the sense orientation under the control of the rice GOS2 promoter a nucleic acid comprising the longest Open Reading Frame in SEQ ID NO: 1 under the non-stress conditions showed 9% increase in the number of primary panicles compared to control, nullyzigotes plants.

### 11.2. OPT4-Like Polypeptides

[0601] Under conditions of reduced nitrogen availability, plants transformed with the OPT4 gene of SEQ ID NO: 155 under the control of the GOS2 promoter showed an increase in aboveground area, total weight of seeds, thousand kernel weight (TKW), root thickness and in the total number of seeds compared to control plants (corresponding nullizygotes).

### 11.3. PLA2-Like Polypeptides

[0602] The results of the evaluation of transgenic rice plants in the T2 generation and expressing a nucleic acid encoding the PLA2-like polypeptide of SEQ ID NO: 253 under non-stress conditions are presented below in Table D. When grown under non-stress conditions, an increase of at least 5% was observed for total weight seeds, number filled seed, harvest index, Thousand Kernel Weight (TKW) and GravityYMax, which is highly correlated to plant height.

TABLE D2
Data summary for transgenic rice plants expressing a nucleic acid
encoding the PLA2-like polypeptide. For each parameter, the p value
from the F Test is p ≦ 0.05 and is above the 5% threshold and
the overall percent increase is shown.

| Parameter | Overall |
|---|---|
| Total weight seeds | 27.8% |
| Number filled seed | 16.0% |
| Harvest index | 21.2% |
| Thousand Kernel Weight (TKW) | 10.9% |
| GravityYMax | 5.4% |

[0603] The table above shows a summary of the data obtained for plants grown under non-stress conditions and transformed with the PLA2-like gene of SEQ ID NO: 252 under the control of the GOS2 promoter compared to control plants (corresponding nullizygotes).

[0604] The results of the evaluation of transgenic rice plants expressing a PLA2-like nucleic acid under nitrogen-stress conditions are presented hereunder in Table D3. An increase was observed for total seed weight, harvest index and thousand-kernel weight and GravityYMax, which is highly correlated to plant height.

TABLE D3
Data summary for transgenic rice plants grown under nitrogen-stress
conditions. For each parameter, the p value from the F Test is
p ≦ 0.05 and is above the 5% threshold and
the overall percent increase is shown.

| Parameter | Overall |
|---|---|
| Total weight seeds | 12.7% |
| Harvest index | 8.1% |
| Thousand Kernel Weight (TKW) | 9.5% |
| GravityYMax | 4.0% |

### 11.4. WOX1-Like Polypeptides

[0605] Approximately 35 independent T0 rice transformants were generated. The primary transformants were transferred from a tissue culture chamber to a greenhouse for growing and harvest of T1 seed. Six events, of which the T1 progeny segregated 3:1 for presence/absence of the transgene, were retained. For each of these events, approximately 10 T1 seedlings containing the transgene (hetero- and homo-zygotes) and approximately 10 T1 seedlings lacking the transgene (nullizygotes) were selected by monitoring visual marker expression. The transgenic plants and the corresponding nullizygotes were grown side-by-side at random positions. Greenhouse conditions were of shorts days (12 hours light), 28° C. in the light and 22° C. in the dark, and a relative humidity of 70%. Plants grown under non-stress conditions were watered at regular intervals to ensure that water and nutrients were not limiting and to satisfy plant needs to complete growth and development.

[0606] Four T1 events were further evaluated in the T2 generation following the same evaluation procedure as for the T1 generation but with more individuals per event. From the stage of sowing until the stage of maturity the plants were passed several times through a digital imaging cabinet. At each time Point digital images (2048×1536 pixels, 16 million colours) were taken of each plant from at least 6 different angles.

[0607] Under non stress conditions, as described above, plants transformed with the WOX1-like gene of SEQ ID NO: 373 under the control of the GOS2 promoter showed an increase in aboveground area, total weight of seeds, thousand kernel weight (TKW), root biomass and in the plant height and in seed fill rate compared to control plants (corresponding nullizygotes).

1-84. (canceled)

85. A method for enhancing a yield-related trait in a plant relative to a corresponding control plant, comprising modulating expression in a plant of a nucleic acid encoding:
(a) an HSFA5 polypeptide comprising:
(i) a DNA binding domain having at least 50% overall sequence identity to the amino acid sequence of any one of SEQ ID NO: 47-70;
(ii) an oligomerisation domain having at least 50% overall sequence identity to the amino acid sequence of any one of SEQ ID NO: 71-94;
(iii) an activation AHA motif having at least 50% overall sequence identity to the amino acid sequence of any one of SEQ ID NO: 95-118;
(iv) an HSF5A motif I having at least 50% overall sequence identity to the amino acid sequence of any one of SEQ ID NO: 119-127; and
(v) an HSF5A motif II having at least 50% overall sequence identity to the amino acid sequence of any one of SEQ ID NO: 128-136;
(b) an HSF4A polypeptide comprising:
(i) a DNA binding domain having at least 50% overall sequence identity to the amino acid sequence of any one of SEQ ID NO: 47-70;
(ii) an oligomerisation domain having at least 50% overall sequence identity to the amino acid sequence of any one of SEQ ID NO: 71-94;
(iii) an activation AHA motif having at least 50% overall sequence identity to the amino acid sequence of any one of SEQ ID NO: 95-118; and
(iv) an HSF4A motif I having at least 50% overall sequence identity to the amino acid sequence of any one of SEQ ID NO: 137-151;
(c) an OPT4-like polypeptide comprising
(i) Motif I: NPG; and
(ii) Motif II: KIPPR (SEQ ID NO: 480),
wherein said OPT4-like polypeptide, when used in the construction of a phylogenetic tree such as the one depicted in FIG. 5, clusters with the group of OPT4-like polypeptides defined by Clade I, II, III or IV, or to the Clade comprising the amino acid sequence of SEQ ID NO: 156;
(d) a PLA2-like polypeptide comprising
(i) an RNA recognition motif 2;
(ii) Motif III: T [TS] [VL] [MI] [IV] [KR] NIPN (SEQ ID NO: 481); and
(iii) Motif IV: SP[PA]RDG (SEQ ID NO: 482) and/or Motif V:
NK[CS]NVGYGFVN[ML]TSP[QE]A (SEQ ID NO: 483); or
(e) a WOX1-like polypeptide, wherein said WOX1-like polypeptide comprises a homeodomain represented by Motif VI:
WNPTPEQLRTLEDLYRRGTRAPSTDQIQDITAQLRRYGRIEGKNVFYWFQNHKA RERQK (SEQ ID NO: 484) or a motif having at least 50% sequence identity to Motif VI, and wherein said WOX1-like polypeptide comprises one or more of the following motifs:
(i) Motif VII: KNWAPS (SEQ ID NO: 485) or a motif having at least 50% sequence identity to Motif VII;
(ii) Motif VIII: QTLQPFPLR (SEQ ID NO: 486) or a motif having at least 50% sequence identity to Motif VIII, wherein Motif VIII is a WUS-like motif but does not have an LELxL repressor motif close to the EAR motif; or
(iii) Motif IX: FEFLPLKH (SEQ ID NO: 487) or a motif having at least 50% sequence identity to Motif IX.

86. The method of claim 85, wherein the modulated expression is effected by introducing and expressing in a plant a nucleic acid encoding an HSFA4 polypeptide, an HSFA5 polypeptide, an OPT4-like polypeptide, a PLA2-like polypeptide, or a WOX1-like polypeptide.

87. The method of claim 85, comprising decreasing expression of the nucleic acid encoding an HSFA4 polypeptide.

88. The method of claim 85, comprising increasing expression of the nucleic acid encoding an HSFA5 polypeptide.

89. The method of claim 85, wherein
(a) the nucleic acid encoding an HSFA4 polypeptide or the nucleic acid encoding an HSFA5 polypeptide encodes any one of the proteins listed in Table A or is a portion of such a nucleic acid, or is a nucleic acid capable of hybridising with such a nucleic acid;
(b) the nucleic acid encoding an OPT4-like polypeptide encodes any one of the proteins listed in Table A2 or is a portion of such a nucleic acid, or is a nucleic acid capable of hybridising with such a nucleic acid;
(c) the nucleic acid encoding a PLA2-like polypeptide encodes any one of the proteins listed in Table A3 or is a portion of such a nucleic acid, or a nucleic acid capable of hybridising with such a nucleic acid; or
(d) the nucleic acid encoding a WOX1-like polypeptide encodes any one of the proteins listed in Table A4 or is a portion of such a nucleic acid, or a nucleic acid capable of hybridising with such a nucleic acid.

90. The method of claim 85, wherein the nucleic acid sequence encodes an orthologue or paralogue of any of the proteins listed in Table A, Table A2, Table A3, or Table A4.

91. The method of claim 85, wherein the enhanced yield-related trait comprises increased yield, increased biomass, and/or increased seed yield relative to a corresponding control plant.

92. The method of claim 85, wherein the enhanced yield-related trait is obtained under non-stress conditions.

93. The method of claim 85, wherein the enhanced yield-related trait is obtained under conditions of drought stress, salt stress, or nitrogen deficiency.

94. The method of claim 86, wherein any of the nucleic acids is operably linked to a constitutive promoter, a GOS2 promoter, or a GOS2 promoter from rice.

95. The method of claim 85, wherein
(a) the nucleic acid encoding an HSFA4 polypeptide or the nucleic acid encoding an HSFA5 polypeptide is of plant origin, from a dicotyledonous plant, from the family Brassicaceae, from the genus Arabidopsis, or from Arabidopsis thaliana;
(b) the nucleic acid encoding an OPT4-like polypeptide is of plant origin, from a dicotyledonous plant, from the family Brassicaceae, from the genus Arabidopsis, or from Arabidopsis thaliana;
(c) the nucleic acid encoding a PLA2-like polypeptide is of plant origin, from a dicotyledonous plant, from the genus Populus, or from Populus trichocarpa; or
(d) the nucleic acid encoding a WOX1-like polypeptide is of plant origin, from a dicotyledonous plant, from the genus Populus, or from Populus trichocarpa.

96. A plant or part thereof, including seeds, obtained by the method of claim 85, wherein said plant or part thereof comprises a recombinant nucleic acid encoding an HSFA4 polypeptide, an HSFA5 polypeptide, an OPT4-like polypeptide, a PLA2-like polypeptide, or a WOX1-like polypeptide.

97. A construct comprising:
(i) a nucleic acid encoding an HSFA4 polypeptide, an HSFA5 polypeptide, an OPT4-like polypeptide, a PLA2-like polypeptide, or a WOX1-like polypeptide as defined in claim 85;
(ii) one or more control sequences capable of driving expression of the nucleic acid sequence of (i); and optionally
(iii) a transcription termination sequence.

98. The construct of claim 97, wherein one of said control sequences is a constitutive promoter, a GOS2 promoter, or a GOS2 promoter from rice.

99. A plant, plant part, or plant cell comprising the construct of claim 97.

100. A method for the production of a transgenic plant having increased yield, increased biomass, and/or increased seed yield relative to a corresponding control plant, comprising:
(i) introducing and expressing in a plant a nucleic acid encoding an HSFA4 polypeptide, an HSFA5 polypeptide, an OPT4-like polypeptide, a PLA2-like polypeptide, or a WOX1-like polypeptide as defined in claim 85; and
(ii) cultivating the plant cell under conditions promoting plant growth and development.

101. A transgenic plant having increased yield, increased biomass, and/or increased seed yield, relative to a corresponding control plant, resulting from modulated expression of a nucleic acid encoding an HSFA4 polypeptide, an HSFA5 polypeptide, an OPT4-like polypeptide, a PLA2-like polypeptide, or a WOX1-like polypeptide as defined in claim 85, or a transgenic plant cell derived from said transgenic plant.

102. The transgenic plant of claim 99, or a transgenic plant cell derived therefrom, wherein said plant is a crop plant, a monocot, a cereal, rice, maize, wheat, barley, millet, rye, triticale, sorghum, emmer, spelt, secale, einkorn, teff, milo, or oats.

103. Harvestable parts of the plant of claim 102, wherein said harvestable parts are shoot biomass and/or seeds.

104. Products derived from the plant of claim 102 and/or from harvestable parts of said plant.

105. An isolated nucleic acid molecule comprising:
(a) the nucleic acid sequence of SEQ ID NO: 189 or SEQ ID NO: 191;
(b) the complement of the nucleic acid sequence of SEQ ID NO: 189 or SEQ ID NO: 191; or
(c) a nucleic acid encoding an OPT4-like polypeptide comprising Motif I: NPG and Motif II: KIPPR (SEQ ID NO: 480) and having at least 50% sequence identity to the amino acid sequence of SEQ ID NO: 190 or SEQ ID NO: 192.

106. An isolated polypeptide comprising:
(a) the amino acid sequence of SEQ ID NO: 190 or SEQ ID NO: 192;
(b) an amino acid sequence comprising Motif I: NPG and Motif II: KIPPR (SEQ ID NO: 480) and having at least 50% sequence identity to the amino acid sequence of SEQ ID NO: 190 or SEQ ID NO: 192; or
(c) derivatives of any of the amino acid sequences of (a) or (b) above.

The application's sequence listing, which the Patent Office published only in electronic form, follows.

SEQUENCE LISTING (487 sequences)

SEQ ID NO: 1 - DNA, 1464 bp, Medicago truncatula
atgaattctgcaccacaatcctcatcagccgctgccgccggcggaagcggaggaggtccggcaccgtttcttcagaagacgtatgacatggtggatgattccaccacagacgagatcgtttcgtggagctctgataacaaaagcttcattgtttggaaccctcctgaattctctcgcgttcttctcccaacctatttcaagcacaacaatttctccagcttcatccgtcagctcaatacctatggatttcgaaaagcagatcctgagcgttgggagtttgccaatgaagaatttatcaaagatcaaaaacatcttctgaagaatatacaccgcaggaaacctatccacagtcatagtcatcctccgggttctgctgtagatccagaaagggcagcattggagcaagaaatagagaagttgtctcgcgagaaaaatgctcttcaaaccaaactcttaagctacaattatctcgatacagaaaagcttcagctggaagattttcagcggcgattggatggcatggagaagaggcagacaaatttgcagaacttctttgagaaggctcttcaagattcttttattgttgaacttctttcccgcaaaattgaatccatggatttggcagcttataataagaaaaggcgattgcctcaggttgatcaggtgcagcctgttgccgaaggtagcttggttgacaatcctagcaatttcagactggaatttgggaatgttttccctcatgatatctcaaataaactcagactggaattgtcaccagctgtctcagatatgaacttgatatcaggtagcacgcagggttcaaacgaagatgaggaaagcctgcagaaaaatctgtctgaaggagaactgacaggaatgcagacaagaactggccttgcttttacacctgaaacactagaccttgcagatactggggcatctttcacttttaacatggattcgtgtttatcacaaagagcaacaactactgagtgcccaaatcttcactctctggagccgagtactgaagaaggcgatagtcatatatcctgccaactaaatttaactctggcatcttgtacattggaattcaataggaattcatactcggccaggtcgccccaaataaactgtcaggaaattggcaatttggcagagtcaagagttaacgctgatggtaaagaatctgaaattggagtttcctcaaaccgaaatgtggctaatgaggctatcaatctagctccaccaaaggaggcttcaggtaacgtccaagtcaaagcagctgctcggcacggagtgaatgatgtgttttgggaaaatttccttactgaaagaccaggctgttcagacaatgaagaggcaatatccaactatcgagcaattccaaatagtgagcaagaagaagggcggtcagttcatggaatctccagtaacatcaagaacatggataatctcaccctttga

SEQ ID NO: 2 - protein, 487 aa, Medicago truncatula
MNSAPQSSSAAAAGGSGGGPAPFLQKTYDMVDDSTTDEIVSWSSDNKSFIVWNPPEFSRVLLPTYFKHNNFSSFIRQLNTYGFRKADPERWEFANEEFIKDQKHLLKNIHRRKPIHSHSHPPGSAVDPERAALEQEIEKLSREKNALQTKLLSYNYLDTEKLQLEDFQRRLDGMEKRQTNLQNFFEKALQDSFIVELLSRKIESMDLAAYNKKRRLPQVDQVQPVAEGSLVDNPSNFRLEFGNVFPHDISNKLRLELSPAVSDMNLISGSTQGSNEDEESLQKNLSEGELTGMQTRTGLAFTPETLDLADTGASFTFNMDSCLSQRATTTECPNLHSLEPSTEEGDSHISCQLNLTLASCTLEFNRNSYSARSPQINCQEIGNLAESRVNADGKESEIGVSSNRNVANEAINLAPPKEASGNVQVKAAARHGVNDVFWENFLTERPGCSDNEEAISNYRAIPNSEQEEGRSVHGISSNIKNMDNLTL

SEQ ID NO: 3 - DNA, 1721 bp, Arabidopsis thaliana
acggcaaaggatctctctctttcccagcatcaccatctcttgtaccagtttctgattagattcaacaatgaacggcgcattaggtaactcctccgcctccgttagcggcggagaaggagccggaggaccagcgcctttcttggtgaaaacctacgagatggtcgacgattcatcaacggaccagatcgtatcgtggagcgctaacaacaacagcttcatcgtttggaatcatgccgaattttcacgcctccttcttccaacctacttcaaacacaataacttctcttccttcattcgtcagctcaatacctatgggtttaggaagattgatccagagaggtgggagtttttgaatgatgattttattaaggatcagaagcatcttctcaagaatatacatagaaggaaacctatacacagccacagtcatccacctgcttcgtcgactgatcaagaaagagcagtgttgcaagagcaaatggacaagctttcacgtgagaaagctgcaattgaagctaagcttttaaagttcaaacaacagaaggttgtagcaaagcatcagtttgaagaaatgactgagcatgttgatgatatggagaataggcagaagaagctgctgaattttttggaaactgcgattcggaatcctacttttgttaagaattttggtaagaaagtcgagcagttggatatttcagcttacaacaaaaagcgaaggctccctgaagttgagcaatcaaagccaccttcagaagattctcatctggataatagtagtggtagctcgagacgcgagtctggaaacatttttcatcaaaatttctctaataaattgcgactagagctttctccagctgattcagatatgaacatggtttcacacagtatacaaagttccaatgaagaaggtgcgagtcccaaagggatactgtcaggaggtgatccaaatactacactaacaaaaagagaaggcctaccatttgcacctgaagctctagagcttgcggataccgggacatgcccgaggagattactgttaaatgataatacaagggtggagaccttgcagcagaggctaacttcttcagaggagactgatggtagcttttcatgtcatttaaatctaaccctggcttctgctccgttaccggacaaaacagcttcacagatagctaagacgactcttaaaagtcaggagttaaactttaactcaatagaaacaagtgcaagtgagaaaaatcggggtagacaagagattgcagttggaggtagccaagcaaatgcagctcctccagcaagagtgaatgatgtattctgggaacagttcctaacagaaaggccagggtcttcagataatgaggaggcaagttcgacttatagaggtaacccatacgaagagcaagaggagaaaagaaacgggagtatgatgttacgtaatacaaagaatatcgagcagctgaccttataaactatttggacggttacatcaacgagagtacgaactgtggttttggtaagaagtatgggtgagtaagtaatgaaacattggactgaaaaagcgtaagtagctttgttgtaaacacttgcgtctctgtctacacaagtaatttgactgtaaatgtaagtgtacaggatttaaattgaataagcatttttttcgtgtcgtaaatgtcaaaacaatatgtagccttcccccaaatcttagtaccgacgatattggt

SEQ ID NO: 4 - protein, 466 aa, Arabidopsis thaliana
MNGALGNSSASVSGGEGAGGPAPFLVKTYEMVDDSSTDQIVSWSANNNSFIVWNHAEFSRLLLPTYFKHNNFSSFIRQLNTYGFRKIDPERWEFLNDDFIKDQKHLLKNIHRRKPIHSHSHPPASSTDQERAVLQEQMDKLSREKAAIEAKLLKFKQQKVVAKHQFEEMTEHVDDMENRQKKLLNFLETAIRNPTFVKNFGKKVEQLDISAYNKKRRLPEVEQSKPPSEDSHLDNSSGSSRRESGNIFHQNFSNKLRLELSPADSDMNMVSHSIQSSNEEGASPKGILSGGDPNTTLTKREGLPFAPEALELADTGTCPRRLLLNDNTRVETLQQRLTSSEETDGSFSCHLNLTLASAPLPDKTASQIAKTTLKSQELNFNSIETSASEKNRGRQEIAVGGSQANAAPPARVNDVFWEQFLTERPGSSDNEEASSTYRGNPYEEQEEKRNGSMMLRNTKNIEQLTL

SEQ ID NO: 5 - DNA, 1514 bp, Medicago truncatula
aaaaagcaggcttaaacaatgaattctgcaccacaatcctcatcagccgctgccgccggcggaagcggaggaggtccggcaccgtttcttcagaagacgtatgacatggtggatgattccaccacagacgagatcgtttcgtggagctctgataacaaaagcttcattgtttggaaccctcctgaattctctcgcgttcttctcccaacctatttcaagcacaacaatttctccagcttcatccgtcagctcaatacctatggatttcgaaaagcagatcctgagcgttgggagtttgccaatgaagaatttatcaaagatcaaaaacatcttctgaagaatatacaccgcaggaaacctatccacagtcatagtcatcctccgggttctgctgtagatccagaaagggcagcattggagcaagaaatagagaagttgtctcgcgagaaaaatgctcttcaaaccaaactcttaagctacaattatctcgatacagaaaagcttcagctggaagattttcagcggcgattggatggcatggagaagaggcagacaaatttgcagaacttctttgagaaggctcttcaagattcttttattgttgaacttctttcccgcaaaattgaatccatggatttggcagcttataataagaaaaggcgattgcctcaggttgatcaggtgcagcctgttgccgaaggtagcttggttgacaatcctagcaatttcagactggaatttgggaatgttttccctcatgatatctcaaataaactcagactggaattgtcaccagctgtctcagatatgaacttgatatcaggtagcacgcagggttcaaacgaagatgaggaaagcctgcagaaaaatctgtctgaaggagaactgacaggaatgcagacaagaactggccttgcttttacacctgaaacactagaccttgcagatactggggcatctttcacttttaacatggattcgtgtttatcacaaagagcaacaactactgagtgcccaaatcttcactctctggagccgagtactgaagaaggcgatagtcatatatcctgccaactaaatttaactctggcatcttgtacattggaattcaataggaattcatactcggccaggtcgccccaaataaactgtcaggaaattggcaatttggcagagtcaagagttaacgctgatggtaaagaatctgaaattggagtttcctcaaaccgaaatgtggctaatgaggctatcaatctagctccaccaaaggaggcttcaggtaacgtccaagtcaaagcagctgctcggcacggagtgaatgatgtgttttgggaaaatttccttactgaaagaccaggctgttcagacaatgaagaggcaatatccaactatcgagcaattccaaatagtgagcaagaagaagggcggtcagttcatggaatctccagtaacatcaagaacatggataatctcaccctttgagcatgctgtctacccagctttcttgtacaaag

SEQ ID NO: 6 - protein, 487 aa, Medicago truncatula; identical to SEQ ID NO: 2

SEQ ID NO: 7 - DNA, 1440 bp, Glycine max
atggacggtgcgccacaatccgccggtgccggaggtccggcgccgttccttctgaagacctacgacatggtggacgatgcctccaccaacgacatcgtttcgtggagctctaccaacaacagcttcgtcgtgtggaaccctcccgagttcgctcgcctccttctcccgacctatttcaagcacaacaacttctccagcttcatccgtcagctcaatacctacggatttcgaaaaatacatccagagcgatgggaatttgctaatgatgagtttctgaaagatcagaagcatcttcttaagaatatatatcgcaggaaacctatccacagtcatagtcatcctccaggttcacttgtagatccagaaagggcagcatttgaggaagaaatagacaaactttcccgtgagaaaacttctcttgaatccaatatttataacttcaaacaacatcagtcaacagcaaagcctaagctagaagattttctgcagcgattagatggtattgagcagaggcagaaacaattgctgaacttctttgagaaggctcttcagaatcctacttttgttgaacatctttcacgcaaaatcgagtccatggatttatctgcatataagaaaaggcgattgcctcaggttgatcatgtgcaaccagttgccgaaagtagcttggtggacagtcatagcaattttagaatggaatttggaaatgttttccatcaagatttctcgaataaacttagactggagttgtcaccagctgtttctgatatgaacttggtatcacgtagcacacagagttcaaatgaagatggggaaagcccacagaaaaagctgtctgaagtagaaccaaaaggagtgcagacaagaacagctcttacatttgcacctgaaacattagagcttgcagatactggggcttcttttacttttaagatggattcatgtttatcgcgaaaaacaacaactgctgagagctcaaaactgatctctttggagccaagtagtgaagaaggtgatagtttatcctgccaactaaacttaactctggcatcttgcccattgcaagtcaacagaaattcatactcagccagatcaccccaaattgactgtcaagaaattggaaaattggcggaatcaagattttttgccaatggtaaagaatctgatagtggtgtttcctcaaacctaaatgtagctgctgaggctaccaatttagctttgtcacaggaggatccaagtaacaaccaagttaacccagctcctccagacagggtgaatgatgttttctgggaacagtttcttaccgaaaggccaggctgttctgacaatgaagaggcaatgtccaactaccgagcaaacccgcatgatgaacaagacgaagggcggtcagctcatggaatctctagaaacattaagaacatggatcaactcacactttga

SEQ ID NO: 8 - protein, 479 aa, Glycine max
MDGAPQSAGAGGPAPFLLKTYDMVDDASTNDIVSWSSTNNSFVVWNPPEFARLLLPTYFKHNNFSSFIRQLNTYGFRKIHPERWEFANDEFLKDQKHLLKNIYRRKPIHSHSHPPGSLVDPERAAFEEEIDKLSREKTSLESNIYNFKQHQSTAKPKLEDFLQRLDGIEQRQKQLLNFFEKALQNPTFVEHLSRKIESMDLSAYKKRRLPQVDHVQPVAESSLVDSHSNFRMEFGNVFHQDFSNKLRLELSPAVSDMNLVSRSTQSSNEDGESPQKKLSEVEPKGVQTRTALTFAPETLELADTGASFTFKMDSCLSRKTTTAESSKLISLEPSSEEGDSLSCQLNLTLASCPLQVNRNSYSARSPQIDCQEIGKLAESRFFANGKESDSGVSSNLNVAAEATNLALSQEDPSNNQVNPAPPDRVNDVFWEQFLTERPGCSDNEEAMSNYRANPHDEQDEGRSAHGISRNIKNMDQLTL

SEQ ID NO: 9 - DNA, 1434 bp, Glycine max
atggacggtgcgccacaatccgccggtggtccggcgccgttccttctcaagacctacgagatggtggacgatgcctccaccaacgacatcgtttcttggagctccaccaacaacagcttcgtcgtgtggaaccctcccgagttcgctcgcctccttctcccgacctatttcaagcacaacaacttttccagcttcatccgccagctcaatacctacggatttagaaaaatacatccagagcgatgggaatttgctaatgatgagtttctgaaagatcagaagcatcttctcaagaatatacatcgcaggaaacctatccacagtcatagtcatcctccaggttctcttgtagatccagaaagggcagcatttgaggaagaaatagacaaactttcccgtgagaaaaattctcttgaatccaatattcgtaacttcaaacaacatcagtcaacagcaaagcctaagctagaagattttctgcagcgattagatggtgttgacaagaggcagaaacaattgctgaacttctttgagaaggctcttcagaatcctactttcgttgaacatctttcacgcaaaattgagtccatggatttatctgcatataagaaaaggagattgcctcaggttgatcacgtgcaaccagttgccgaaagtagcttggtggacaatcatagcaattttagaatggaatttggaaatgttttccggcaagatttttcgaataaactcagactggagttgtcacctgctgtttcagatatgaacttggtatcacgtagcacacagagttcaaatgaagatggggaaagctcacagaaaaagctgtctgaagtagaaccaagaggagtgcagacaagaacagctcttacatttgcacctgaaacattagagcttgcagatactggggcttcttttacttttaagatggattcatgtttatcacgaagagcaacaactgctgagagctcaaaactgatctctttggagccaagtagtgaagaaggcgatagtttatcctgccaactaaacttaactctggcatcttgtccattgcaagtgaacagaaattcatactcagccagatcaccccaaattgactgtcaagaaattggaaaattggcagaatcaagattttttgccaatggtaaagaatctgatagtggtgtttcctcaaacctaaatgtagctgctgaggctaccaatttagcttcatcacaggaggctccaagtaacaaccaagttaacccagctcctccagacagggtgaatgatgttttctgggaacagtttcttactgaaaggccaggctgttctgacaatgaagaggcaatatccaactaccgagcaaacccatatgatgaacaagacgaaggacggtcaactcatggaatctctagaaacattaagaacatggatcaactcacactttga

SEQ ID NO: 10 - protein, 477 aa, Glycine max
MDGAPQSAGGPAPFLLKTYEMVDDASTNDIVSWSSTNNSFVVWNPPEFARLLLPTYFKHNNFSSFIRQLNTYGFRKIHPERWEFANDEFLKDQKHLLKNIHRRKPIHSHSHPPGSLVDPERAAFEEEIDKLSREKNSLESNIRNFKQHQSTAKPKLEDFLQRLDGVDKRQKQLLNFFEKALQNPTFVEHLSRKIESMDLSAYKKRRLPQVDHVQPVAESSLVDNHSNFRMEFGNVFRQDFSNKLRLELSPAVSDMNLVSRSTQSSNEDGESSQKKLSEVEPRGVQTRTALTFAPETLELADTGASFTFKMDSCLSRRATTAESSKLISLEPSSEEGDSLSCQLNLTLASCPLQVNRNSYSARSPQIDCQEIGKLAESRFFANGKESDSGVSSNLNVAAEATNLASSQEAPSNNQVNPAPPDRVNDVFWEQFLTERPGCSDNEEAISNYRANPYDEQDEGRSTHGISRNIKNMDQLTL

SEQ ID NO: 11 - DNA, 1365 bp, Medicago truncatula
atgccaacaacaaccggtctaccacacgacaagatggatggtgtgccgctatcctcattcggcggcggcagaaacggaggaaatccgacgccgtttgttcagaagacgtatgacatggtggacgattctgcgacagatgatatcatctcgtggagccctatgaacaacagcttcatcgtttggaaccctcctgaattcgctggggttctcctcccaacctatttcaaacacaacaatttcgccagcttcattcgtcagctcaatacctatggatttcgaaaaaaggattcggagcgttgggagtttgctaatgaggaatttataaaagatcaaaaacatcttttgaagaatatacaccgtaggaaacctatccacagtcatagtcatcctccgggttctgctgttgatccagaaagggcagcttttgagaaagaaatagagaagctttcccaagagaaaaattatcttgagtccagtgtcttaaactacaagcatcatcagtcaacagcaaagtttcagctggataatttccagcagctattggatggcatggagattaggcagacacgtgtgttaaactactttgagaaggctcttcagaatcctacttttgttgatcgtcttaagcgcaaaattgaatccatggatgcagcggcatgtaataagaaaaggcggttgcctcatgttgatcatgtgcagcctgttgctgcaggtagcttgattgacaatcatagcaattttagtctaggatttgaaaatgttttccatcaaaatttcttgaataaactcagactggaattgtcaccatctgtctcagatatgaacttggtatcaggtagcacacacgtttcaactgaaaacgaggaaagcctgcagaaaaatttgtctgaaggagaactgacagaaatgcagacaagaactgacgttgcttttgcacctgaaacattagagcttgcagatcctggggcatcttttgcttttaacatggattcatgtttatcacgacgagcaacaactactaagagcccaaatcttcaatctttagagccaagtagtaaagaaggtgatagttatatatcccgccaactaaatttgactctggcatcctgcacattagaattcaacaggaattcatactcggccaggtcaccccagatagactgtcaaaaaattggcaatatggcagaatcaagggttaacgccagcggtaaagaatctgaaattggagtttactcaaaacgaaatttggctaacaaggttctcaatttagcttcaccgcaggaggtttcaggtagcatccaagtcaaaccagctgctccaaaaagagtgaatgacttgttttgggaacagttcctcactgaatga

SEQ ID NO: 12 - protein, 454 aa, Medicago truncatula
MPTTTGLPHDKMDGVPLSSFGGGRNGGNPTPFVQKTYDMVDDSATDDIISWSPMNNSFIVWNPPEFAGVLLPTYFKHNNFASFIRQLNTYGFRKKDSERWEFANEEFIKDQKHLLKNIHRRKPIHSHSHPPGSAVDPERAAFEKEIEKLSQEKNYLESSVLNYKHHQSTAKFQLDNFQQLLDGMEIRQTRVLNYFEKALQNPTFVDRLKRKIESMDAAACNKKRRLPHVDHVQPVAAGSLIDNHSNFSLGFENVFHQNFLNKLRLELSPSVSDMNLVSGSTHVSTENEESLQKNLSEGELTEMQTRTDVAFAPETLELADPGASFAFNMDSCLSRRATTTKSPNLQSLEPSSKEGDSYISRQLNLTLASCTLEFNRNSYSARSPQIDCQKIGNMAESRVNASGKESEIGVYSKRNLANKVLNLASPQEVSGSIQVKPAAPKRVNDLFWEQFLTE

SEQ ID NO: 13 - DNA, 1872 bp, Oryza sativa
atcataccaaaccccacccaacctacaacgaccacgacgactcctctcctccctttctctctcttcacccgcagcacgcgcgccgccgtctccggcgatggaagttgccgccggcgcccgcggcggcggggccggcggaggagggggaggccccgcgccgttcctgctcaagacgtacgagatggtggacgacccgtcgacggacgcggtggtgtcgtggagcgacgcctccgacgcgagcttcgtcgtctggaaccacccggagttcgccgcccgcctgctgcccgcctacttcaagcacagcaacttctccagtttcatccgccagctcaacacctacggattccgtaaaatagatccagagcgatgggaatttgccaatgagtacttcatcaagggacaaaagcacctgctgaagaatatccacaggcgtaagcctatccacagccacagccatccaccaggtgctctgcccgataatgagcgtgcaatatttgaggatgagatcgaacggctttcacgagagaaatccaacctccaggctgacctctggaaatccaagcagcagcagtcgggaacgatgaaccagattgaagatcttgagcgacgagtgcttggcatggagcagcgacagaccaagatgattgccttcttgcagcaagctagtaagaaccctcagtttgtcaacaagcttgttaagatggcagaagcatcttcgattttcacggatgctttcaataagaagagaaggttacctggtttggattacagtatcgagaacacagaaaccacaagcttttatgatgaccatagcagcacttctaagcaagaaacaggcaatcttttaaatcagcacttctctgataagcttaggttgggactttgtcctgccatgacagagagcaatatcatcacgctaagcacgcaaagctcaaacgaagataacagaagccctcatggtaaacatccagagtgtgacatgatggggagggaatgtctcccgttggtgccgcagatgatggaactctccgataccggcacatctatctgcccctccaagagctcttgctttgcaccacctataagtgatgaaggcctcttaacatgccatctgagtctaactcttgcatcatgctcgatggatgttgacaaaagccaaggcctcaatgcaaatgggaccactatagacaacccaactgaggcagcaacagctaccatggaaaaggatgacaccattgacagaagcttcgatgacaaccaaaagaaatcagctgattctcgtacagcagatgccacaacaccacgagcggatgcacgagtagccagtgaggctcctgcagccccggctgcagtggtgaatgacaagttctgggagcagttcctaacagagcgacctggctgctctgaaactgaagaagcaagctctggcctaagaacagatacttccagggagcaaatggagaacaggcaggcatatgatcactcacggaatgacagagaagacgtggaacaactgaaactctgaatttactatagaattatacaatttacaagaagggatacaggcgtacagtgtaagatgtttagaatcaggaacctgctgttaaacatgacagatcaatgggtgtacaacatcacacaggtgtacatattttttttccctgaatgtttcggagggttaagattaatagttcgattaaccacaccagttgttgtaaaatcgatgtgtctgtctgtctggcatggtttctcatcttgttggtagtgatttatgttatgcagtgtcaagctgccacagcggagaatcaaaattagcatgtacattacccttaaatatccttttcgtaaaaatatttttacgatcattttttt

SEQ ID NO: 14 - protein, 475 aa, Oryza sativa
MEVAAGARGGGAGGGGGGPAPFLLKTYEMVDDPSTDAVVSWSDASDASFVVWNHPEFAARLLPAYFKHSNFSSFIRQLNTYGFRKIDPERWEFANEYFIKGQKHLLKNIHRRKPIHSHSHPPGALPDNERAIFEDEIERLSREKSNLQADLWKSKQQQSGTMNQIEDLERRVLGMEQRQTKMIAFLQQASKNPQFVNKLVKMAEASSIFTDAFNKKRRLPGLDYSIENTETTSFYDDHSSTSKQETGNLLNQHFSDKLRLGLCPAMTESNIITLSTQSSNEDNRSPHGKHPECDMMGRECLPLVPQMMELSDTGTSICPSKSSCFAPPISDEGLLTCHLSLTLASCSMDVDKSQGLNANGTTIDNPTEAATATMEKDDTIDRSFDDNQKKSADSRTADATTPRADARVASEAPAAPAAVVNDKFWEQFLTERPGCSETEEASSGLRTDTSREQMENRQAYDHSRNDREDVEQLKL

SEQ ID NO: 15 - DNA, 1568 bp, Populus trichocarpa
cgttttcttcttcttctgcagacctatcaaatggaagcgggatcatcgccatccgccgccgccggcggaggaccggcgccgttcttgataaagacatatgacatggtggatgattcatcgactgacgagattgtgtcttggagttcgaacaaaaacagctttgtcgtatggaaccctccagaattcgccagattgttgcttcctacctttttcaagcacaataatttctctagctttatcagacaattaaatacctatggatttagaaagattgatcctgagaaatgggaatttgccaatgaagattttttgaaagatcagaagcatctgcttaagaacatccacagaagaaaaccaatccacagtcacagcaaccctcaaggttctttagtggatcaagaaagagcagcatatgaggaagaaatagacaagctttcacgtgataaagccaaactcgaggcaagtattctagggttttcacagcagcggtcatctgcaaagcttcatgtggaagatctaacacagaggatagatactatgcagcagaggcaggaaaagttgctgtcgttcttagagaaggctgttcaaaaccctgcttttgttgaacatcttgcttgtaagattgaatctatggatttttcagcatatagcaagaagagacgactgcctcaagttgatcactcaatgccaactgcagaaaatagttttgtcgaaaatcactgtagttctaggcctgagtctaatgtcatccatcaagatttctcaaataagttgaggctggaattatcaccagctgtttcagatattaatttgatttcacgtagtacgcagagctccaatgaagacgggggaagcccacaaaggaaaatatctgaagggaatccaaaagatggacctactaggacatcaggtttactattggcacctgaaacattggaactttcggatactgggacatcgtatacatttaaagtgaatcctgctgtcccaagagacttaccagcaagtgggagccaagcacaacattcactgcaggcgaatttgacttccaatgaagaagttgatggccttatttcctgtcaattgaacctaactctggcatcttctgcattgcaagtcaacaaaaatccttatttagctaggatgcctccactacgtcaggaaattgtcaaatctccagaatcaaggtttaacgagagtaacaaagattctgacatgcgagttattcagaacatgaatctgggtaacgagggcacaactttatcctcctcccaggagatcccaaataacagtcaagtgcctgcatcagctccagctagagtcaatgatggtttctgggaacagttcctaactgaaagaccgggctcttatgaaaatgaagaggcaagttctaattaccgagcaaactcttatgatgagcaggatgaaagaaggttaggtttcggagtgccaagaaatgctaaaaacatggagcagctctctctatgagcatcacaattgtcttaaagcttagcgagaggtgtgcggaggtttctcctggtaccttcggtagtttcaaaaatttacaa

SEQ ID NO: 16 - protein, 485 aa, Populus trichocarpa
MEAGSSPSAAAGGGPAPFLIKTYDMVDDSSTDEIVSWSSNKNSFVVWNPPEFARLLLPTFFKHNNFSSFIRQLNTYGFRKIDPEKWEFANEDFLKDQKHLLKNIHRRKPIHSHSNPQGSLVDQERAAYEEEIDKLSRDKAKLEASILGFSQQRSSAKLHVEDLTQRIDTMQQRQEKLLSFLEKAVQNPAFVEHLACKIESMDFSAYSKKRRLPQVDHSMPTAENSFVENHCSSRPESNVIHQDFSNKLRLELSPAVSDINLISRSTQSSNEDGGSPQRKISEGNPKDGPTRTSGLLLAPETLELSDTGTSYTFKVNPAVPRDLPASGSQAQHSLQANLTSNEEVDGLISCQLNLTLASSALQVNKNPYLARMPPLRQEIVKSPESRFNESNKDSDMRVIQNMNLGNEGTTLSSSQEIPNNSQVPASAPARVNDGFWEQFLTERPGSYENEEASSNYRANSYDEQDERRLGFGVPRNAKNMEQLSL

SEQ ID NO: 17 - DNA, 1583 bp, Populus trichocarpa
actcgtcttttcttcgacagaacaatcaaaatggaagcaggaccatcgtcagcgacctcaggaggtggtggtggtggtggaggaggaccggcgccgttcttggtaaagacatatgacatggtggatgattcatcgaccgacgagatcgtgtcttggagttcgaataaaaacagctttgttgtttggaaccctccagaattcgccagattgttgctccctacctttttcaagcacaataatttctctagctttatcagacaattaaatacctatggatttagaaagattgatcctgagagatgggaatttgccaatgaagattttgtgaaagatcaaaagcacctgcttaagaatatctaccgaagaaaaccaatccacagtcatagtcaacctcaaggttctttagtggatccagaaagagcagcatatgaggaagaaatagaaaagcttgcacgtgataaagctaaactcaaggcaagtattctagggtttgaacagcagcggtcatctgcaaagctacaggtggaagatctaacacagaagatagatactatgcagcagaggcaggaaaagctgctgtcgttcttagagaaggctgttcaaaaccctacttttgttgaacaccttgctcgtaagattgaagctatggatttttcagcctatagcaagaagagacgattgccccaagttgatcacccaatgccaattgcagaaaatagtcttgtggaaaatcacagtagttctagacctgagtcgaatgtcatccatcaagatttcccagataagttgagactggaattgtcaccagctgtttcagatattaatttggtttcacacagcacacagagctccaatgaagatgggggaagcccacaaagaaaaatatctgaagggaatccaaaagatgcactgactaggacatcaggtttactactggcacctgaaacattggaactttcagacacaggggcatcgtatgcatttaaagtgaatccagctgtcccaagagacataccagcaaatgggagcccagcactacattcactgcagtcgaatttgacttctaatgaagaagttgatggtcacatttcctgtcagctaaatcttagtctggcatcttctcctttgcaagtcaacaaaaatccttatttaactaggatacctcaactaggccaggaaattggcaaatctccagaatcaaggtttaatgagagtaacaaagattctgatatccgagttagtcagaacaacatgaatctgggtaacgaggtcagagctttatccaattcccaggaaaccccaaataacaatcaagcacctgcatcagctccggttagagtgaatgatgttttctgggaacagttcctaactgaaaggcccggctattctgataatgaagaggcaagttctaattacagagcaaacccatatgatgagagagaaagaaggataggtttcggagtgccaagaaatgctaaaaacatggagcagctctctctgtgagcatcacagttgtcttagagcttagcgaaaggtttgcagatgtttctctcagtacctttggtgctctcaaaaaattacca

SEQ ID NO: 18 - protein, 490 aa, Populus trichocarpa
MEAGPSSATSGGGGGGGGGPAPFLVKTYDMVDDSSTDEIVSWSSNKNSFVVWNPPEFARLLLPTFFKHNNFSSFIRQLNTYGFRKIDPERWEFANEDFVKDQKHLLKNIYRRKPIHSHSQPQGSLVDPERAAYEEEIEKLARDKAKLKASILGFEQQRSSAKLQVEDLTQKIDTMQQRQEKLLSFLEKAVQNPTFVEHLARKIEAMDFSAYSKKRRLPQVDHPMPIAENSLVENHSSSRPESNVIHQDFPDKLRLELSPAVSDINLVSHSTQSSNEDGGSPQRKISEGNPKDALTRTSGLLLAPETLELSDTGASYAFKVNPAVPRDIPANGSPALHSLQSNLTSNEEVDGHISCQLNLSLASSPLQVNKNPYLTRIPQLGQEIGKSPESRFNESNKDSDIRVSQNNMNLGNEVRALSNSQETPNNNQAPASAPVRVNDVFWEQFLTERPGYSDNEEASSNYRANPYDERERRIGFGVPRNAKNMEQLSL

SEQ ID NO: 19 - DNA, 1904 bp, Arabidopsis thaliana
gctgcttgaaattctcttgtctgattaaaatatatatacccaagtccagaagctgtttaggttcgagaagcagagagggttcgagaagctaataagggtttcttctttttgattttaatgctaaaagggttctagattcgttgaattttacaagggttttaggggttcttagaagcttttgcttgattgtcttttatttagaaacagtggtgagtttttagtctttcactttgttcaagttcgaagctttttttggagggaattttgggcttctgattttgatcgaaacttactgatagtaagttctttgagtcctccttaactgtagtttctgtgtactgaagttattgaattgaaagtttttatcttttttggttattgaaactttcatagtttgatcaaaagagtctcttgctctgtttttggctctgtttttgtgagtgtgattgtaagctttgttgtgagtagattgaatcaaggagtgtgagagttgttaaaagtgttttcagagatggatgagaataatcatggagtttcatcaagctcacttccacctttcctcaccaaaacatatgagatggttgatgattcttcatccgattctatcgtctcttggagtcagagcaataagagtttcatcgtttggaatccgccggagttttctagagatcttcttccgagattcttcaagcacaataacttctctagctttatccgccagcttaacacatatggttttagaaaagctgatcctgagcaatgggaatttgcgaatgatgattttgtgagaggtcaacctcatcttatgaagaacattcatagacgcaaaccagttcatagccactctttaccgaatcttcaagctcagttaaacccgttgacggattcagaacgagtgagaatgaataatcagattgagagattgacaaaagagaaagaaggattgcttgaagagttacataaacaagacgaggaacgagaagtgtttgagatgcaagtgaaagaacttaaagaacgattacaacacatggagaagcgtcagaaaacaatggtttcgtttgtttctcaagtattggaaaagccagggcttgctttgaacctatcgccgtgtgttcccgaaacaaacgagaggaaaagaaggttccctaggatcgagttctttcccgatgaaccgatgttggaagagaacaaaacttgtgttgttgtgagagaggaaggttctacaagcccttcttcacacacaagagagcatcaagtggaacagttagagtcatcgatagcgatttgggagaatcttgtatcggattcttgtgagagtatgttacaatcaagaagtatgatgacacttgatgtggatgaatcatctacttttccagagagccctcctctttcttgcatacagttaagtgtcgattcacgtctcaaatctcctccttctccaaggatcatcgatatgaactgtgagcccgatggttcgaaagaacagaacactgttgctgctcctcctcctcctccagtagcaggagcgaatgatggcttctggcagcagtttttctcagagaatcctggctcaaccgagcaacgggaagttcaattagagaggaaagacgataaagataaagccggagtacgtactgagaaatgttggtggaattcgagaaatgttaatgcaattacagaacagcttggacatctgacttcttcagagagaagttgatatgtcaaagattaaatttctagtctgttttagttacttgtaaaatagggtttctcagttttattgttttcgattacagtacttaggtatggttcagctgtttatttatcacttgtatgatctttcacagttcattgtagcagacttcaatggtaatgataagctagagcttatggatagtattcat

SEQ ID NO: 20 - protein, 401 aa, Arabidopsis thaliana
MDENNHGVSSSSLPPFLTKTYEMVDDSSSDSIVSWSQSNKSFIVWNPPEFSRDLLPRFFKHNNFSSFIRQLNTYGFRKADPEQWEFANDDFVRGQPHLMKNIHRRKPVHSHSLPNLQAQLNPLTDSERVRMNNQIERLTKEKEGLLEELHKQDEEREVFEMQVKELKERLQHMEKRQKTMVSFVSQVLEKPGLALNLSPCVPETNERKRRFPRIEFFPDEPMLEENKTCVVVREEGSTSPSSHTREHQVEQLESSIAIWENLVSDSCESMLQSRSMMTLDVDESSTFPESPPLSCIQLSVDSRLKSPPSPRIIDMNCEPDGSKEQNTVAAPPPPPVAGANDGFWQQFFSENPGSTEQREVQLERKDDKDKAGVRTEKCWWNSRNVNAITEQLGHLTSSERS

SEQ ID NO: 21 - DNA, 1515 bp, Arabidopsis thaliana
acaacagttgttgttgccattcatacgcgcttccatcaaccctttggtcttggaagccaaatcaaacctttccttcaatcctcaaattttcgaaaattttctcttttgctttacgttctctcaattcttatttgtaagaaagtttgttcctttaatcaatcaaatcaaagagacttttgaagattgtttcccaatttgcgtcaatcgggatcgagtcaaatctgaaatcttctccactcatcatctgactataagacttaatcaagggactttttgttcgggtttggttttaaacgtcttggattcgaagtggttaaggtatggatgaaaataatggaggttcaagctcacttccacctttccttactaaaacatatgaaatggttgatgattcttcttctgactcggtcgttgcttggagcgaaaacaacaaaagcttcatcgtcaagaatccagcagagttttcaagagaccttcttccgagattcttcaagcataagaatttctcaagtttcatccgtcagcttaatacatatggttttcgaaaagtagatcctgagaaatgggaattcttgaatgatgattttgttagaggtcgaccttaccttatgaagaacattcatagacgaaaaccggttcatagccactcgttagtgaatctacaagcgcaaaatcctttgacggaatcagaaagacggagcatggaggatcagatagaaagactgaaaaatgagaaagaaggccttcttgcggagttacagaaccaagagcaagaacggaaagagtttgagctgcaagtaacgacattgaaagatcggttacaacatatggaacaacatcagaaatcaatagtggcatatgtttcacaggttttgggaaaaccaggactttcactaaacctcgaaaaccatgagagaagaaaaagaagatttcaagagaactctcttcctccaagcagttcacacatagaacaggtcgaaaagttagaatcttcgctaacgttttgggagaatcttgtatcggaatcatgcgagaagagcggtttgcagtcatcaagcatggatcatgatgcagctgagtcaagtctaagtattggcgatacacgacccaaatcatcgaagattgatatgaactcagagccgcccgttaccgttactgcgcctgctccaaaaacaggcgttaacgatgacttttgggaacaatgtttgacagagaaccctggatcaaccgagcaacaagaagttcagtcagagagaagagatgtcggtaatgataataatggtaataagattggaaatcaaaggacgtattggtggaattcagggaatgtaaataacattacagagaaagcttcttgacatgaatgaggtttttgtaaaatagttttcttttggttccactgagattattgtatgtgttcattatttattactctgtttctgtaaaaacaaatctctctattgtttgaggcaggagtgacataaatgcatatgcagaattggtttctttgccttc

SEQ ID NO: 22 - protein, 345 aa, Arabidopsis thaliana
MDENNGGSSSLPPFLTKTYEMVDDSSSDSVVAWSENNKSFIVKNPAEFSRDLLPRFFKHKNFSSFIRQLNTYGFRKVDPEKWEFLNDDFVRGRPYLMKNIHRRKPVHSHSLVNLQAQNPLTESERRSMEDQIERLKNEKEGLLAELQNQEQERKEFELQVTTLKDRLQHMEQHQKSIVAYVSQVLGKPGLSLNLENHERRKRRFQENSLPPSSSHIEQVEKLESSLTFWENLVSESCEKSGLQSSSMDHDAAESSLSIGDTRPKSSKIDMNSEPPVTVTAPAPKTGVNDDFWEQCLTENPGSTEQQEVQSERRDVGNDNNGNKIGNQRTYWWNSGNVNNITEKAS

SEQ ID NO: 23 - DNA, 1983 bp, Oryza sativa
cgccctgcacccgttgccaccaccaccgccttctccgccgcgccgcctcctctcgcgtctcccgctcgtgcagggcgcgcgtcgtcgggcgagctgctgccgtctccgtggccgtggctgatcagaactagttggcgttcgatcggaaagtcgctgtcttttggcgactcggtgagaatttgcgccgcggttcaatgtgaaaaattttggcccgtggcgagttggatttggcgccgagtccattcaggtggttaagacttgttcgtgggagagcgaagctgcgcgcgttaagaccgggctccgttcttgcatcgtgcagagcagctgctggtttgagaattgagaggcgcggttgacatggagagttccaacctgggcggcggcggcggcggaggcggcggcggtgggccgccgccgttcttgatcaagacgtacgagatggtggaggacgcggcgaccaaccacgtcgtgtcgtggggccccggcggcgccagcttcgtcgtgtggaacccgctcgacttctcccgtgacctgttgcccaagtacttcaagcacaacaacttctccagcttcatcaggcagctcaacacctacggtttccgaaaaatcgatcctgagagatgggagttcgcaaacgaggatttcataagagggcacacgcaccttctgaagaacatccatcgacgcaagcccgtgcacagccactccctccagaaccagataaacggaccactcgccgaatcggagaggcgcgagctcgaagaagagatcaaccggctcaagtacgagaagagcatcctcgtcgcggacctccagaggcagaaccagcagcagtacgtgatcaactggcagatgcaggcgatggaaggcaggctagtggcgatggagcaacggcagaagaacatcgtggcctccctgtgcgagatgctgcagagacgcggtggcgccgtgtcgagctcgctgctggagtccgaccatttcagcaagaagaggagggtcccgaagatggatctcttcgtcgacgattgcgcggcgggcgaagaacagaaggtgttccagttccagggaattgggacggatgcaccggccatgcctcccgtgcttcctgtgaccaatggtgaggcttttgacagggttgagctgagcctggtctccctggagaaactcttccagagagcaaatgatgcttgcacagctgctgaagaaatgtactcccatggtcatggtggtactgaacccagcactgctatatgtcctgaagagatgaacactgctccaatggagacaggcatcgatcttcagttaccagctagcctccatcccagctcacccaacacagggaatgcccatctccatttatccactgaactcacagagtctccaggttttgtgcagagtccagagctgccaatggcagagattcgtgaagatatccatgtgacaagatacccaacacaagctgatgtaaattctgagattgcctcctccactgatacttcacaagatggcacgtcagaaactgaagcttcgcatggaccgaccaacgatgtgttttgggagcggttcctcacagagactccacggtcatgtttggatgagtcagaaagacaagagtctcccaaggacgatgtaaaagcagaattaggctgcaatggcttccatcaccgggagaaggttgatcagatcaccgagcaaatggggcaccttgcttcagccgagcagactctgcatacctgatgcagtaataccatttgcgcggattcatagttcgtgtgtaaattagcgaagatgtaaattatagcttagatcggattagaggcttgcgtgttactttacagatttcaaccttttattagattacaataggtctttcacaatttatgattctgttctatccgctgactactgtgcataaattttttttagtagaccatatccatttttgtactccattgcccttctaagattcctcgttaaaatctc

SEQ ID NO: 24 - protein, 459 aa, Oryza sativa
MESSNLGGGGGGGGGGGPPPFLIKTYEMVEDAATNHVVSWGPGGASFVVWNPLDFSRDLLPKYFKHNNFSSFIRQLNTYGFRKIDPERWEFANEDFIRGHTHLLKNIHRRKPVHSHSLQNQINGPLAESERRELEEEINRLKYEKSILVADLQRQNQQQYVINWQMQAMEGRLVAMEQRQKNIVASLCEMLQRRGGAVSSSLLESDHFSKKRRVPKMDLFVDDCAAGEEQKVFQFQGIGTDAPAMPPVLPVTNGEAFDRVELSLVSLEKLFQRANDACTAAEEMYSHGHGGTEPSTAICPEEMNTAPMETGIDLQLPASLHPSSPNTGNAHLHLSTELTESPGFVQSPELPMAEIREDIHVTRYPTQADVNSEIASSTDTSQDGTSETEASHGPTNDVFWERFLTETPRSCLDESERQESPKDDVKAELGCNGFHHREKVDQITEQMGHLASAEQTLHT

SEQ ID NO: 25 - DNA, 1209 bp, Glycine max
atggatgatgcacagggtagttcaagttccctgccccctttcctggcaaagacttatgagatggtggatgatccttccacggattcggttgtttcgtggagtatcactagcaagagtttcattgtatggaatcccccagaatttgccagggatttgctgcctagattctttaagcacaacaacttctcaagtttcatcaggcagctgaacacatatggatttagaaaagttgacccagaacaatgggaatttgccaatgatgattttgttagagggcagcctcatcttatgaagaacatccatagacggaagccggttcatagccattctttgcagaatctccaagcacaaggcccaataggggaggcagaaaggcagagttttactgatgaaatagagaagcttaaacacgataaagagcaactcctcgtggaattacagaaatatcagcatgagtggcaggcatatgagatacaaatgcattcctcaaaagatcggttggaaaagttggaacagaatcaacaaaagatggtttcttctgtttctcatgtattgcagaaacctgtgatttctgtaaatatcttgcctctgacagaaaccatggatagaaagcgaaggttgccgagaagtggccacttttatgatgaagctagcgttgaagatgctatggaaacttcccaaatgttaccaagagaaaatgcagacaataccactgtcttgacgttaaatgtggagcgactggatcagcttgaatcatccatggcattttgggaggctattgtacatgatattggtgacaccttcgtccaaattcagtcaaacatggattttgatgaatctacaagttgtgctgatagtccatctatatcttgtgcacaattagatgttgaagttcggcctaagtcacctggaattgacatgaactctgagccaactacagctgctgttcctgagcctgttgcatcaaaagaacaacctgcaggaaccactgttgcagcaactggtgttaatgatgtattctgggagcagttcttgactgaggatcctggtgcatcagaaacacaggaagtgcagtcagaaagaaaggaatatgatggcagaaagaatgaaggaaaacccagcgaccttaacaaattttggtggaacaaatggaatgcaaataatcttccagaacagatggggcatgttggtcaagcagagaaaacatag

SEQ ID NO: 26 - protein, 402 aa, Glycine max
MDDAQGSSSSLPPFLAKTYEMVDDPSTDSVVSWSITSKSFIVWNPPEFARDLLPRFFKHNNFSSFIRQLNTYGFRKVDPEQWEFANDDFVRGQPHLMKNIHRRKPVHSHSLQNLQAQGPIGEAERQSFTDEIEKLKHDKEQLLVELQKYQHEWQAYEIQMHSSKDRLEKLEQNQQKMVSSVSHVLQKPVISVNILPLTETMDRKRRLPRSGHFYDEASVEDAMETSQMLPRENADNTTVLTLNVERLDQLESSMAFWEAIVHDIGDTFVQIQSNMDFDESTSCADSPSISCAQLDVEVRPKSPGIDMNSEPTTAAVPEPVASKEQPAGTTVAATGVNDVFWEQFLTEDPGASETQEVQSERKEYDGRKNEGKPSDLNKFWWNKWNANNLPEQMGHVGQAEKT

SEQ ID NO: 27 - DNA, 1209 bp, Glycine max
atggatgatgcacagggtagttcaaattctctgccccctttcctggcaaagacttatgagatggtggatgatccttccacggattcggttgtttcgtggagtgtcactagcaagagtttcattgtatggaatcccccagaatttgccagggatttgctgcctagattctttaagcacaacaacttctcaagtttcatcaggcagctgaacacatatggatttaaaaaagttgacccagaacaatgggaatttgccaatgatgactttgtcagagggcaacctcatcttatgaagaacatccatagacggaagcctgttcatagccattctttgcagaatctccaagcacaaggcccgctaggggaatcagaaaggcagagttttactgatgaaatagagaagcttaagcatgataaagagcaacttctcgtggaattacagaaataccagcatgagtggcaggcatatgagatacaaatacattgctcaaaagatcggttggaaaagttggaacagaatcaacaaaggatggtttcttctgtttctcatgtattgcagaaacctgtgatttctgtaaatatcttgcctctgacagaaaccctggatagaaaacgaaggttgccaagaagtggccacttttatgatgaagatggcgttgaagatgccattgaaacttgccaaatgttaccaagagaaaatgcagaccataccactgtcttgacattaaatgtggagcgactggatcagcttgaatcatccatggcgttttgggaggctattgtacatgatattggtgacaccttcgttcaaattcagtcaagtatggatttggatgaatctacaagttgtgctgatagtccatctttatcttgtgcgcaattagatgttgaagttcggcataagtcaccgggaattgacatgaactctgagccaactacagctgctgttcctgagcctgttgcatcaaaagaacaacctgcgggaaccactgttgcagcaactggtgttaatgatgtattctgggagcagttcttgacagaggatcctggtgcatcagaaacacgggaagtgcagtcagaaagaaaggattatgaaggcagaaagaatgaaggaaaacccagcgaccttaacaaattttggtggaacaaacggaatgcaaataatcttccagaacagatggggcatgttggtcaagcagagaaaacttag

SEQ ID NO: 28 - protein, 402 aa, Glycine max
MDDAQGSSNSLPPFLAKTYEMVDDPSTDSVVSWSVTSKSFIVWNPPEFARDLLPRFFKHNNFSSFIRQLNTYGFKKVDPEQWEFANDDFVRGQPHLMKNIHRRKPVHSHSLQNLQAQGPLGESERQSFTDEIEKLKHDKEQLLVELQKYQHEWQAYEIQIHCSKDRLEKLEQNQQRMVSSVSHVLQKPVISVNILPLTETLDRKRRLPRSGHFYDEDGVEDAIETCQMLPRENADHTTVLTLNVERLDQLESSMAFWEAIVHDIGDTFVQIQSSMDLDESTSCADSPSLSCAQLDVEVRHKSPGIDMNSEPTTAAVPEPVASKEQPAGTTVAATGVNDVFWEQFLTEDPGASETREVQSERKDYEGRKNEGKPSDLNKFWWNKRNANNLPEQMGHVGQAEKT

SEQ ID NO: 29 - DNA, 1179 bp, Glycine max
atgatggaggaagctcagggcagttctagttccctgccacctttcctcaccaagatttatgagatggtggatgatccttcaactaattccattgtttcatggagtgccaccaataggagtttcattgtttggaacccaccagagttttcaagggatttgttacccaaatactttaagcacaacaacttttccagtttcatcaggcagctcaacacttacggctttagaaagattgatcctgaacaatgggaatttgcaaatgatgattttgtaagaggtcagccacatcttttgaagaacatccataggcgcaaacctgtccatagccattctttgcagaatatccagggtcaaggggtttcttcgctgactgaatcagaaaggcagagttttaaggatgagatagagaagcttaaacatgaaaaagaacaacttcttcgggagttagagatgcatgaacaggagtggaaaatgtatgaggtacaattacaacactccaatgatcgtttggaaaagttggaaaagaagcaagaaaatttggtttcttctgtctctcaagtgttgcagaaacctgggattgccttaaatctcttgctgttgacagaaaacatggatagaaaacggaggttgccaagaagtggtctctttagtgatgacgctagcattgaagatcatatggaaacttcccaagtattaccaagggaaaatgcagatggtgcttctattttctcatcgagcacagaacggttggatctccttgagtcatccatgacgttttgggagaatattacacatgatgttggtgacgtctttgttcaaagtcatttaaacttggattttgatgaatctacaagttgtgcagatagtccagctatatcttgtgtgcaactagaagttgaagatcagcctaagtcacatggaatcaacgtgagttctgagccagctgtagttgcggctcctgatcttgatgcatcaaaagaacaacctgtcgaaacagctcctctgactactggtgttaatgacatattctgggaacgattcttgacagagaatcctggttcgtcagaaatgcaggaagctcagtctgaaagagaggattctgatggcagaagtaatgccaaattttggtggaacattaggaatgtaaataaccctccagaacagatggggcattcttag

SEQ ID NO: 30 - protein, 392 aa, Glycine max
MMEEAQGSSSSLPPFLTKIYEMVDDPSTNSIVSWSATNRSFIVWNPPEFSRDLLPKYFKHNNFSSFIRQLNTYGFRKIDPEQWEFANDDFVRGQPHLLKNIHRRKPVHSHSLQNIQGQGVSSLTESERQSFKDEIEKLKHEKEQLLRELEMHEQEWKMYEVQLQHSNDRLEKLEKKQENLVSSVSQVLQKPGIALNLLLLTENMDRKRRLPRSGLFSDDASIEDHMETSQVLPRENADGASIFSSSTERLDLLESSMTFWENITHDVGDVFVQSHLNLDFDESTSCADSPAISCVQLEVEDQPKSHGINVSSEPAVVAAPDLDASKEQPVETAPLTTGVNDIFWERFLTENPGSSEMQEAQSEREDSDGRSNAKFWWNIRNVNNPPEQMGHS

SEQ ID NO: 31 - DNA, 1179 bp, Glycine max
atgatggaggaagctcagggcaattctagttccctgccacctttcctcaccaagacttatgagatggtggatgatccttccactaattctattgtttcatggagtgccaccaataggagtttcattgtttggaacccaccagagttttcaagggatttgttacccaaatactttaagcacaacaacttttccagtttcatcaggcagctcaacacttatggctttagaaagattgatcctgaacaatgggaatttgcaaatgatgattttgtaagaggccagccacatcttttgaagaatatccataggcgcaaacctgttcatagccattctttgcagaatatccagggtcaagggtcttctttgctgactgaatccgaaaggcggagttttaaagatgagatagagaagcttaaacatgaaaaagaaagacttcttcgggagttagagaggcatgaacaggagtggaaaatgtacgaggtacaattacaacactccaatgattgtttggaaaagttggaaaagaagcaagaaagtttggtttcttctgtttctcaagtgttgcagaaacctgggatagccttgaatctcttactgctgacagaaaacatggatagaaaaaggaggttgccaagaagtggtctctttagtgatgacgctggcattgaagatcatatggaaacttccccagtattaccaagggaaaatgcagatggttcctctattttctcatcgagcacagagcgattggatctgctcgagtcatccatgacgttttgggaggatattacacatgatgttggtgacatctttgttcaaagtcatttaaacctggattttgatgcatctacaagttgtgcagatagtccagctatatcttgtgtgcaactagaagttgaagatcagcctaagtcacctggaatcaacatgaattctgagccatctgtagttgctgttcctgatcttgatgcatcaaaagaacaaccagtgggaaaagcccctgtgactactggtgttaatgacatattctgggaacgattcttgacagagaatcctggttcatctgaaatgcaggaagcacagtctgaaagaaaggattctgatggcagaagtaatgccaaattttggtggaacattaggaatgtaaataaccctccagaacagatggggcattcttag

SEQ ID NO: 32 - protein, 392 aa, Glycine max
MMEEAQGNSSSLPPFLTKTYEMVDDPSTNSIVSWSATNRSFIVWNPPEFSRDLLPKYFKHNNFSSFIRQLNTYGFRKIDPEQWEFANDDFVRGQPHLLKNIHRRKPVHSHSLQNIQGQGSSLLTESERRSFKDEIEKLKHEKERLLRELERHEQEWKMYEVQLQHSNDCLEKLEKKQESLVSSVSQVLQKPGIALNLLLLTENMDRKRRLPRSGLFSDDAGIEDHMETSPVLPRENADGSSIFSSSTERLDLLESSMTFWEDITHDVGDIFVQSHLNLDFDASTSCADSPAISCVQLEVEDQPKSPGINMNSEPSVVAVPDLDASKEQPVGKAPVTTGVNDIFWERFLTENPGSSEMQEAQSERKDSDGRSNAKFWWNIRNVNNPPEQMGHS

SEQ ID NO: 33 - DNA, 1206 bp, Medicago truncatule
atggatgaagcaggaagttcgagttctttgcctccttttctggcaaagacttatgagatggtggatgatcgatcctcggatcctattgtttcgtggagtgcatcgaacaaaagtttcgttgtgtggaatcctccggaattcgcaagggttttgcttcctagattctttaagcacaataacttctccagttttatcaggcagctgaatacatatggatttaggaaagttgatccggaacaatgggaatttgccaatgatgattttttaagggggcaaccacatcttatgaagaatattcatagacggaagccggttcatagtcattctctgcataatcttcaagcacaagcccctctaacggagtctgaaaggcagagtatggttgatgaaatagagaagctgaaacaggatagagaacaactcctcatggagacgaacagataccagcatgattgggaaacgtatgagattcaaatgcattgttcgaaagatcagttggaaaaattggaacataagcaacaaaagatgttgtcctctgtttctgaagcactgcagaaacctatgattgctgtaaatctcttgccactggcagaagccatggagagaaaacgaaggttgccggcgagaagtggttgctttaataatgaagctagtgttgaagatgctatggagacttctgtagctttgcccagggaaaatgcagaggataactctactttgacgttaaacaccgagagattggatcaacttgaggcatccgtggcattttgggagactcttgcacatgaagttggcggcaatttcgttcacactcattcaaacatggatttagatgaatctacatgctgtgctgatagtttgtccatatcttctcagcaactagacggtgaagttcgacctaagtcacctgaaattgacatgaacgttgaaccagcttctgctgctcttgaggctgttgcactaaaagaacaacctgcgagaatcaccactgcagcaactggggttaatgatgtattctgggagcagttcttgactgaggatcctggtgcatcggaagcacaggaagtgcaatcagaaagaaaagataatagtagcagaaaaaatgaaggaaaacctagtgatcatggtagattttggtggaacatgcggaaatcaaacaatcatcctgaacagatggggcatgttagtcaagtagagaaaatttag

SEQ ID NO: 34 - protein, 401 aa, Medicago truncatula
MDEAGSSSSLPPFLAKTYEMVDDRSSDPIVSWSASNKSFVVWNPPEFARVLLPRFFKHNNFSSFIRQLNTYGFRKVDPEQWEFANDDFLRGQPHLMKNIHRRKPVHSHSLHNLQAQAPLTESERQSMVDEIEKLKQDREQLLMETNRYQHDWETYEIQMHCSKDQLEKLEHKQQKMLSSVSEALQKPMIAVNLLPLAEAMERKRRLPARSGCFNNEASVEDAMETSVALPRENAEDNSTLTLNTERLDQLEASVAFWETLAHEVGGNFVHTHSNMDLDESTCCADSLSISSQQLDGEVRPKSPEIDMNVEPASAALEAVALKEQPARITTAATGVNDVFWEQFLTEDPGASEAQEVQSERKDNSSRKNEGKPSDHGRFWWNMRKSNNHPEQMGHVSQVEKI

SEQ ID NO: 35 - DNA, 1953 bp, Oryza sativa
cacccaatcaccccaaccgaaccccgcacggcgcaccggacgccgtcgcgtccggtcgctcgtcctccgcgaccccacctgaacaactgaagaactcatcatccgtcatccctccccctcccgccagttaccctccagtaccatcctccgcccgcctcgtcttaaaacgccttctggaaaattccgccaatccgagagggatttttcctcgcaaccaaccaaaccaaccaaacccccaaccaagcgagcaagccgccttcgccgggggggcccccaccctgacggcaaccctagccctccgatcaccggcgctgagactgatcccgccgccgtaggaggaggaggaggaggtggtggtggtggtggtgatggaggggggcggcgggggcgggtcgctgccgccgttcctgagcaagacgtacgagatggtggacgacccgtcgacggacgcggtggtggggtggacgcccgccggcaccagcttcgtcgtcgccaaccagcccgagttctgccgggatctgctccccaagtacttcaagcacaacaacttctccagcttcgtgcgacagctcaacacctatggctttaggaaagtagatccagaacaatgggaatttgcaaatgaggatttcataaaaggacagcggcaccggttgaaaaatatacatagacgcaaacctatattcagccattcatcacacagtcagggtgctggaccattaacagataatgaaaggaaagactatgaggaagaaatcgagaggctcaaatccgataatgcagcactgtcctcagagcttcaaaataatacgttgaagaaacttaatatggagaaacgaatgcaggctttggaagagaagctatttgttgtggaagatcagcagaggagtctgatatcatacgtcagagagattgtaaaggcaccaggatttctttctagctttgtacagcaacaagatcatcacaggaagaagaggagactgccaataccaatctccttccatgaggatgcaaatactcaggagaaccagatcatgccttgtgacttgaccaactcaccagctcagacattttacagagaatcatttgacaagatggaatcatccttgaactcattagaaaatttccttcgagaagcaagtgaagaatttggtaatgatatttcatatgatgatggtgtcccaggcccttcttcaactgttgttctcacagagctccattcacctggtgaaagtgatccccgtgtttcatcacctccaacaaggatgcgtacttcgtcagctggtgcaggagattcgcactcctctcgtgatgtagcagagtctaccagctgtgcagaaagtcctcctattcctcaaatgcattctcgtgtagatacacgagcgaaggtttctgaaatagatgttaattcagaacctgctgttacagaaactggtccatcaagagatcaacctgctgaagagcctcctgctgtcacacctggtgcaaacgatggcttctggcagcagtttcttaccgagcagcctggatcatcagatgcacatcaggaggctcaatcagaacggcgagatggaggaaacaaggtggatgagatgaaatcaggagatcgacaacatctttggtggggcaaaaggaacgttgagcagataacagaaaaacttggacttctcacctcaacggagaaaacctgacataattttgtttttctttttgtagatgaaaaactattaattcaggaacgctgacattggtgccttcctcagtgagatatgttgactaacatctatttcgcagtgtaccgtattttttccatcatgtaccgtaatgtatcatagtgccatacattcatctttggtccattgacactttctgatatcattgtgcgtgatttctaaaatattctcaagtttggttaaatgttacagattctatttatgcttgattgtttgctac

SEQ ID NO: 36 - protein, 440 aa, Oryza sativa
MEGGGGGGSLPPFLSKTYEMVDDPSTDAVVGWTPAGTSFVVANQPEFCRDLLPKYFKHNNFSSFVRQLNTYGFRKVDPEQWEFANEDFIKGQRHRLKNIHRRKPIFSHSSHSQGAGPLTDNERKDYEEEIERLKSDNAALSSELQNNTLKKLNMEKRMQALEEKLFVVEDQQRSLISYVREIVKAPGFLSSFVQQQDHHRKKRRLPIPISFHEDANTQENQIMPCDLTNSPAQTFYRESFDKMESSLNSLENFLREASEEFGNDISYDDGVPGPSSTVVLTELHSPGESDPRVSSPPTRMRTSSAGAGDSHSSRDVAESTSCAESPPIPQMHSRVDTRAKVSEIDVNSEPAVTETGPSRDQPAEEPPAVTPGANDGFWQQFLTEQPGSSDAHQEAQSERRDGGNKVDEMKSGDRQHLWWGKRNVEQITEKLGLLTSTEKT

SEQ ID NO: 37 - DNA, 1996 bp, Oryza sativa
tagcacggctgcacgccctgcacccgttgccaccaccaccgccttctccgccgcgccgcctcctctcgcgtctcccgctcgtgcagggcgcgcgtcgtcgggcgagctgctgccgtctccgtggccgtggctgatcagaactagttggcgttcgatcggaaagtcgctgtcttttggcgactcggtgagaatttgcgccgcggttcaatgtgaaaaattttggcccgtggcgagttggatttggcgccgagtccattcaggtggttaagacttgttcgtgggagagcgaagctgcgcgcgttaagaccgggctccgttcttgcatcgtgcagagcagctgctggtttgagaattgagaggcgcggttgacatggagagttccaacctgggcggcggcggcggcggaggcggcggcggtgggccgccgccgttcttgatcaagacgtacgagatggtggaggacgcggcgaccaaccacgtcgtgtcgtggggccccggcggcgccagcttcgtcgtgtggaacccgctcgacttctcccgtgacctgttgcccaagtacttcaagcacaacaacttctccagcttcatcaggcagctcaacacctacggtttccgaaaaatcgatcctgagagatgggagttcgcaaacgaggatttcataagagggcacacgcaccttctgaagaacatccatcgacgcaagcccgtgcacagccactccctccagaaccagataaacggaccactcgccgaatcggagaggcgcgagctcgaagaagagatcaaccggctcaagtacgagaagagcatcctcgtcgcggacctccagaggcagaaccagcagcagtacgtgatcaactggcagatgcaggcgatggaaggcaggctagtggcgatggagcaacggcagaagaacatcgtggcctccctgtgcgagatgctgcagagacgcggtggcgccgtgtcgagctcgctgctggagtccgaccatttcagcaagaagaggagggtcccgaagatggatctcttcgtcgacgattgcgcggcgggcgaagaacagaaggtgttccagttccagggaattgggacggatgcaccggccatgcctcccgtgcttcctgtgaccaatggtgaggcttttgacagggttgagctgagcctggtctccctggagaaactcttccagagagcaaatgatgcttgcacagctgctgaagaaatgtactcccatggtcatggtggtactgaacccagcactgctatatgtcctgaagagatgaacactgctccaatggagacaggcatcgatcttcagttaccagctagcctccatcccagctcacccaacacagggaatgcccatctccatttatccactgaactcacagagtctccaggttttgtgcagagtccagagctgccaatggcagagattcgtgaagatatccatgtgacaagatacccaacacaagctgatgtaaattctgagattgcctcctccactgatacttcacaagatggcacgtcagaaactgaagcttcgcatggaccgaccaacgatgtgttttgggagcggttcctcacagagactccacggtcatgtttggatgagtcagaaagacaagagtctcccaaggacgatgtaaaagcagaattaggctgcaatggcttccatcaccgggagaaggttgatcagatcaccgagcaaatggggcaccttgcttcagccgagcagactctgcatacctgatgcagtaataccatttgcgcggattcatagttcgtgtgtaaattagcgaagatgtaaattatagcttagatcggattagaggcttgcgtgttactttacagatttcaaccttttattagattacaataggtctttcacaatttatgattctgttctatccgctgactactgtgcataaattttttttagtagaccatatccatttttgtactccattgcccttctaagattcctcgttaaaatctc

SEQ ID NO: 38 - protein, 459 aa, Oryza sativa; identical to SEQ ID NO: 24

SEQ ID NO: 39 - DNA, 1331 bp, Populus trichocarpa
ttggatgaaagattagggttttatttaaggatggatgaatcacagggcacttcgaattcgctaccgccttttcttgcaaaggcatatgagatggtggatgatccttcctcggattcaattgtttcatggagtcagaacaataagagttttgttgtatggaatccaccggagtttgccagggacttgctgcccagattttttaagcataataacttctctagcttcatcagacagctcaatacttatggttttaggaaaattgatcccgagcaatgggaattcgccaatgaggattttattagaggtcagccacatctaatgaagaacatccatagacggaagccagttcatagccattcgatgcagaatcttcaaggacaagggtcgaatctgctaactgattctgaaagacagagtatgaaggatgatatagagaagcttaaacgtgataaacaagcacttattttggagttacaaaagcaggaacaagagcggaaaggatttgagatgcaaatcgagggtttgaaggagaagttacaacaaacggaatgcatacagcaaactatagtgtcttttgtggctcgagtgttgccgaaaccaggtcttgcattaaatataatgccacaattggaaggtcgcgatagaaaacggaggctgcctagaattggttatctatacagtgaagcctctaatgaggataaccaaatggtgacttcccaagctctgtctcgagaaaatgcagacagtaattctgttgccctgttaaacatggagcagtttgagcagttggaatcatcccttacattttgggagaatatggtacatgatattggtcaaacctacaactataacaattcaacgatagagatggatgactctacaagtggtgcacaaagtccagctatatcttgtgtgcatctgaatgttgattttcgtcccaaatcacctggtattgacatgaattctgagccctctgcagctgttgcaccagagcctgtttcaccgaaggaacaactagccgggactgctcccactgtggccactggagtcaatgatgtattctgggagcagtttttaactgagaatcctggttcaaccaacgcacaggaagttcaatctgaaagaaaggattctgatggtagaaaaggtgaaataaagcctgttgatcccggaaaattttggtggaatatgaggaatgtaaataatcttacagaacagatggggcatcttactcctgctgaaagaacttgacattggttgacagttttttcaacttctgatgcctcagagacactctctctctctctctctctatctctctttatttctta

SEQ ID NO: 40 - protein, 406 aa, Populus trichocarpa
MDESQGTSNSLPPFLAKAYEMVDDPSSDSIVSWSQNNKSFVVWNPPEFARDLLPRFFKHNNFSSFIRQLNTYGFRKIDPEQWEFANEDFIRGQPHLMKNIHRRKPVHSHSMQNLQGQGSNLLTDSERQSMKDDIEKLKRDKQALILELQKQEQERKGFEMQIEGLKEKLQQTECIQQTIVSFVARVLPKPGLALNIMPQLEGRDRKRRLPRIGYLYSEASNEDNQMVTSQALSRENADSNSVALLNMEQFEQLESSLTFWENMVHDIGQTYNYNNSTIEMDDSTSGAQSPAISCVHLNVDFRPKSPGIDMNSEPSAAVAPEPVSPKEQLAGTAPTVATGVNDVFWEQFLTENPGSTNAQEVQSERKDSDGRKGEIKPVDPGKFWWNMRNVNNLTEQMGHLTPAERT

SEQ ID NO: 41 - DNA, 1442 bp, Populus trichocarpa
ataagtgaatagaataagaagaaaatagttatggatggttcacagagtaacagttcaaatgcaccaccgccttttctaaccaaaacatatgacatggtggatgatcccttgactaactcggtggtgtcatggagccacagtggttgcagttttgtggtgtggaatccacctgaatttgctcaggatttgcttcccaagtacttcaagcacaataacttctccagttttgtcaggcagcttaatacttatggatttaggaagattgatcctgatcagtgggagtttggtaacgaagaatttataagagggcagagacatattctaaagaatattcaccggcggaagccagttcatagccattccatgcagaatcatgggattatctctccgcttgctgaaacagaaaaacaggaatatgagaaggaaattaaccgactgaaacatgataagaacgaacttgagttggagctacagagaaacgaggcagagaagcagggatttgaatttcaaatcgtctcactgggtgagcgcttacagagtatggaatgcagacagaagcagttgatgtccttcctgggtcagctaatgcgaaaaccagagtttgcctctcttctcatgcagcagtctgaatatcataacaaaaagagaaagctactgaaacttgattacttccagggcgattacaaagaggagaatgagaatttgtgttctccaattgcaaacctggatggattgcctgctccaatgctgcatccggagtcggttgagaagttggattcatcattaaaattcttggaagattttctctatgctgttggtgaaagttttagtgaagaagtgtgccatgttggtgtcagatcacaaccttcaatggtcatagttagagaattaagttcatcctctgcagatggcgagccttggtctccaagatcatttccatcttcaccacattcgagggatattcgttcatcacctgagctggctagatgtatcaataatgttgtcagacaaacaactccaagttatctcggtgatgatacgatgcctgaatcttcacagttacaggcaaattgcaagcattctagagctccagcatctgaagtcataaaagcaccagcattagagatgaaaagtcctactgtggtgaatggagcaaatgatcttttctggcaacacttcctgactgaggcccccggtccgcatgatggacaagaatctgaaggtcgaacagaaagaaggattacagatgacataagaagcaataccaagccggacagtcacgagagatcttggtggaatacgaactacatagataatcttgcaaaaaatatgggacacattgcgacagctgaaagatcatgatggtagtagattccttggtcccttcgcgtctcatgtctttactgaatgtaaattactaacagaagaggtaaattattttt

SEQ ID NO: 42 - protein, 443 aa, Populus trichocarpa
MDGSQSNSSNAPPPFLTKTYDMVDDPLTNSVVSWSHSGCSFVVWNPPEFAQDLLPKYFKHNNFSSFVRQLNTYGFRKIDPDQWEFGNEEFIRGQRHILKNIHRRKPVHSHSMQNHGIISPLAETEKQEYEKEINRLKHDKNELELELQRNEAEKQGFEFQIVSLGERLQSMECRQKQLMSFLGQLMRKPEFASLLMQQSEYHNKKRKLLKLDYFQGDYKEENENLCSPIANLDGLPAPMLHPESVEKLDSSLKFLEDFLYAVGESFSEEVCHVGVRSQPSMVIVRELSSSSADGEPWSPRSFPSSPHSRDIRSSPELARCINNVVRQTTPSYLGDDTMPESSQLQANCKHSRAPASEVIKAPALEMKSPTVVNGANDLFWQHFLTEAPGPHDGQESEGRTERRITDDIRSNTKPDSHERSWWNTNYIDNLAKNMGHIATAERS

SEQ ID NO: 43 - DNA, 2478 bp, Solanum lycopersicum
ctcaaactctcacccgtctctcccctcatccatctcttaccgactctctctcattctcataacctctccatctatctttcaactaaattaaaatctaataagcaacaaacggcttgagcagatgatattttattgatacatgcgagtgatttgtatcagatgagaaatgatgaaaactttgagcgctcaagccgttgatacaaatttatacaacttaatataattaaattcgtcgatacaaattaattatattaatgatacaatcaaatacaatatatattcatcgcctctttcaactctttttctatttcgatcgcctctctcttaataacatataattataaatcgcaattttttttaaaatatctttattaactcacttatattaactggttaaaaaatggtttaactactcatttcacactcttaaaataaccaccctatataaactatatataataaaatatgaataaacatccaaaaaccattgagaagaagtctttgagaaaagggtcaaagtaaacttcatctttctatgtgcttcttcttgttaaggactattcttgattttttcttacaggaaagttcggaaatttctgagttttagagggtgaaacggctatcttttgaattcaagctagcatttgtttgagcacttgtgggaactcatgatgggccgcaatctcttttaacaattctttagcaaatttgtgtgttttgaaagctatccagagctgggacttgaatggaaatgtgtatttgctaagaatttgtatgatcaggtgggagctgcttcaattgaatttatcgaaggaaatcaaggtgataacacttttggttggttgtatctgtatgttgggaatctgataagttgatcttccctgtcagtaaggatttgtcacttgtagttgagcttcgccttgtgagtttcatttcaaggggttgtgatttggatttgaatttaccatggatgaagctccttgcagcgtcaatgcactgcctccgtttattgcaaagatatatgaaatggtggatgatccctccactgatccaatagtctcatggagtttaaacaataaaagttttattgttcgtaatcctcctgattttgcaagagatttgttgcccagatactttaagcacaataatttttccagctttatccgacagctgaatacttacggattcaagaaaatagatcccgaacaatgggaattcgcaaatgaggattttcttagaggtcagccacaccttttgaagaatatctatagacggaaacctgttcacagtcattctgtacagaatattcatagcctctcatcatctgcattgaccgaatcggaaagacaagggtataaggaagatattgaaaagttgaagcatgagaacgaatcacttcatttagttctacacaggcataaacaggatcatcaaggacttgaaatgcaaatgcaggtccttaaccaacgtgtccaacaagtgaaagaccggcaaaagaacgtgctgtctactttagctcgaaccataaataaaccaggattagctttgagtctcatgccacaactggaaatgaatgaaaggaagagaaggttgccaggaaacagttttctttacaatgaaataggcctggaagataatcaagcgagttcttctgaaaatacgactagggaaaatatggaccatacttctctttcgactctcaacaaggaagtgctagatcagttggaatcttctttgaccttttgggagtatacactgcgtgacattgatcaaactagaatgagacggagctcttcaatagacttggatgaatctatcagttgtgccgatagccctgctatatcttacccacaactaactgttgatgttggatctaaggtttctgatattgacatgaactctgagcctaatggaaacactactcctgatgttactccgccagaaaaccgagtagagactgctagtcacaatgtgccaacaggagtaaatgatgtattctgggaacaattccttactgagaaccctggttctactgatgtaaagccggagagagaagatatggagagcaaaataagtgaatccaaaacagttgaggatgggaaattttggtggaacaggaagactgtaattagccttacagaacagttgggacatcttactccagcagagtgaatgtaatgtggcagggtatgtactatttttgatagtaaatgtttatttgcctgtttcttgttgtaaatttagagaaagtgatttgtctgagtacatagaattttggtatattaaccttctttttttttgtttttgcatgacatgatgtagtgaatgatagagtcgatcagtcttaatgctagtctggcacaatttcatgtattatgtagttatattctttccagccttgcctgtccatgttgccgatttgtgttacataagatgagagtaatttttctagcactatgttaatgcaatccttttgct

SEQ ID NO: 44 - protein, 401 aa, Solanum lycopersicum
MDEAPCSVNALPPFIAKIYEMVDDPSTDPIVSWSLNNKSFIVRNPPDFARDLLPRYFKHNNFSSFIRQLNTYGFKKIDPEQWEFANEDFLRGQPHLLKNIYRRKPVHSHSVQNIHSLSSSALTESERQGYKEDIEKLKHENESLHLVLHRHKQDHQGLEMQMQVLNQRVQQVKDRQKNVLSTLARTINKPGLALSLMPQLEMNERKRRLPGNSFLYNEIGLEDNQASSSENTTRENMDHTSLSTLNKEVLDQLESSLTFWEYTLRDIDQTRMRRSSSIDLDESISCADSPAISYPQLTVDVGSKVSDIDMNSEPNGNTTPDVTPPENRVETASHNVPTGVNDVFWEQFLTENPGSTDVKPEREDMESKISESKTVEDGKFWWNRKTVISLTEQLGHLTPAE

SEQ ID NO: 45 - DNA, 1297 bp, Solanum lycopersicum
ttttcttcccctttctcattgaaaactcaaagtataataatcttcgcaattcacattagaatcgttaaaagtagtatatgagtgtgcatagtcatggataactgtaatggaggatcaagttcttcttctccggcgccttttttgttgaaaacttatgaactggttgatgattcgtatactaatccagttgtttcatggagccataacggacgtagcttcgttgtttggaatccacctgaattcgctagagatttgcttccgaaatactttaagcataacaatttctcaagttttatcagacaacttaatacttatgggtttagaaaggttgatcctgaacaatgggagtttgcgaacgaggattttttaagaggacgtagacatttgttgaagaatatttatagacgaaagccgatccatagccactctgctgcagcaggaacagggcaatctgtagctccattgacggattctgagagacaggagtatgaagatgaaatcgagaggttgaagagagaaaacagtcttcttcagtcgtctgcggagaatcaattgaaattcaatggggagtacgaaagtggaattaagtctatggagcaacgtttacagaacgttgctcatagacaggggaaattgatttctcttttagctcaattactacaaacacctggattttcatctgatttcactcaaagcgcgagcaggaagagacgattgttgatatcaaattacttgattgacgaggaaaactcaccaaaattcgacttggaaatggttaaaaagttggattcatcaatcaatttttgggagcggtttctgtatggtgttcaaacacaagatttcgagcatacacattccccaattgttacacatacatcatctaatgattctgccaaacgaaactctcccatcgatcattcaccatcctcctccgagttagggccattgaatcctgtcatgtcatcaacttatgaaaatttaaaacgtcaacttaagccatctgataatcagattgagtgtaagaccagtaaaacatctgaattagtatcaaactcgggtaatgatgtattttggcaacagttcttaacagagacgcctggttgcactgagccacaacaagttgagaacaaagggataaacgaatcaacgcgtgatattagattaggggatagccatagatattggtggaatcgcggagttaatttagaaaatcttgctgaaagaatgggacatcttagtagtccagcaacaggaagctgagttgattcagtatttgacattttatagctattggtgg

SEQ ID NO: 46 - protein, 388 aa, Solanum lycopersicum
MDNCNGGSSSSSPAPFLLKTYELVDDSYTNPVVSWSHNGRSFVVWNPPEFARDLLPKYFKHNNFSSFIRQLNTYGFRKVDPEQWEFANEDFLRGRRHLLKNIYRRKPIHSHSAAAGTGQSVAPLTDSERQEYEDEIERLKRENSLLQSSAENQLKFNGEYESGIKSMEQRLQNVAHRQGKLISLLAQLLQTPGFSSDFTQSASRKRRLLISNYLIDEENSPKFDLEMVKKLDSSINFWERFLYGVQTQDFEHTHSPIVTHTSSNDSAKRNSPIDHSPSSSELGPLNPVMSSTYENLKRQLKPSDNQIECKTSKTSELVSNSGNDVFWQQFLTETPGCTEPQQVENKGINESTRDIRLGDSHRYWWNRGVNLENLAERMGHLSSPATGS

SEQ ID NO: 47 - protein, 98 aa, Arabidopsis thaliana
PFLVKTYEMVDDSSTDQIVSWSANNNSFIVWNHAEFSRLLLPTYFKHNNFSSFIRQLNTYGFRKIDPERWEFLNDDFIKDQKHLLKNIHRRKPIHSHS

SEQ ID NO: 48 - protein, 98 aa, Medicago truncatula
PFLQKTYDMVDDSTTDEIVSWSSDNKSFIVWNPPEFSRVLLPTYFKHNNFSSFIRQLNTYGFRKADPERWEFANEEFIKDQKHLLKNIHRRKPIHSHS

SEQ ID NO: 49 - protein, 98 aa, Medicago truncatula; identical to SEQ ID NO: 48

SEQ ID NO: 50 - protein, 98 aa, Medicago truncatula
PFVQKTYDMVDDSATDDIISWSPMNNSFIVWNPPEFAGVLLPTYFKHNNFASFIRQLNTYGFRKKDSERWEFANEEFIKDQKHLLKNIHRRKPIHSHS

SEQ ID NO: 51 - protein, 98 aa, Glycine max
PFLLKTYDMVDDASTNDIVSWSSTNNSFVVWNPPEFARLLLPTYFKHNNFSSFIRQLNTYGFRKIHPERWEFANDEFLKDQKHLLKNIYRRKPIHSHS

SEQ ID NO: 52 - protein, 98 aa, Glycine max
PFLLKTYEMVDDASTNDIVSWSSTNNSFVVWNPPEFARLLLPTYFKHNNFSSFIRQLNTYGFRKIHPERWEFANDEFLKDQKHLLKNIHRRKPIHSHS

SEQ ID NO: 53 - protein, 98 aa, Populus trichocarpa
PFLIKTYDMVDDSSTDEIVSWSSNKNSFVVWNPPEFARLLLPTFFKHNNFSSFIRQLNTYGFRKIDPEKWEFANEDFLKDQKHLLKNIHRRKPIHSHS

SEQ ID NO: 54 - protein, 98 aa, Populus trichocarpa
PFLVKTYDMVDDSSTDEIVSWSSNKNSFVVWNPPEFARLLLPTFFKHNNFSSFIRQLNTYGFRKIDPERWEFANEDFVKDQKHLLKNIYRRKPIHSHS

SEQ ID NO: 55 - protein, 99 aa, Oryza sativa
PFLLKTYEMVDDPSTDAVVSWSDASDASFVVWNHPEFAARLLPAYFKHSNFSSFIRQLNTYGFRKIDPERWEFANEYFIKGQKHLLKNIHRRKPIHSHS

SEQ ID NO: 56 - protein, 98 aa, Arabidopsis thaliana
PFLTKTYEMVDDSSSDSIVSWSQSNKSFIVWNPPEFSRDLLPRFFKHNNFSSFIRQLNTYGFRKADPEQWEFANDDFVRGQPHLMKNIHRRKPVHSHS

SEQ ID NO: 57 - protein, 98 aa, Arabidopsis thaliana
PFLTKTYEMVDDSSSDSVVAWSENNKSFIVKNPAEFSRDLLPRFFKHKNFSSFIRQLNTYGFRKVDPEKWEFLNDDFVRGRPYLMKNIHRRKPVHSHS

SEQ ID NO: 58 - protein, 98 aa, Glycine max
PFLAKTYEMVDDPSTDSVVSWSITSKSFIVWNPPEFARDLLPRFFKHNNFSSFIRQLNTYGFRKVDPEQWEFANDDFVRGQPHLMKNIHRRKPVHSHS

SEQ ID NO: 59 - protein, 98 aa, Glycine max
PFLAKTYEMVDDPSTDSVVSWSVTSKSFIVWNPPEFARDLLPRFFKHNNFSSFIRQLNTYGFKKVDPEQWEFANDDFVRGQPHLMKNIHRRKPVHSHS

SEQ ID NO: 60 - protein, 98 aa, Medicago truncatula
PFLAKTYEMVDDRSSDPIVSWSASNKSFVVWNPPEFARVLLPRFFKHNNFSSFIRQLNTYGFRKVDPEQWEFANDDFLRGQPHLMKNIHRRKPVHSHS

SEQ ID NO: 61 - protein, 98 aa, Glycine max
PFLTKIYEMVDDPSTNSIVSWSATNRSFIVWNPPEFSRDLLPKYFKHNNFSSFIRQLNTYGFRKIDPEQWEFANDDFVRGQPHLLKNIHRRKPVHSHS

SEQ ID NO: 62 - protein, 98 aa, Glycine max
PFLTKTYEMVDDPSTNSIVSWSATNRSFIVWNPPEFSRDLLPKYFKHNNFSSFIRQLNTYGFRKIDPEQWEFANDDFVRGQPHLLKNIHRRKPVHSHS

SEQ ID NO: 63 - protein, 98 aa, Populus trichocarpa
PFLAKAYEMVDDPSSDSIVSWSQNNKSFVVWNPPEFARDLLPRFFKHNNFSSFIRQLNTYGFRKIDPEQWEFANEDFIRGQPHLMKNIHRRKPVHSHS

SEQ ID NO: 64 - protein, 98 aa, Solanum lycopersicum
PFIAKIYEMVDDPSTDPIVSWSLNNKSFIVRNPPDFARDLLPRYFKHNNFSSFIRQLNTYGFKKIDPEQWEFANEDFLRGQPHLLKNIYRRKPVHSHS

SEQ ID NO: 65 - protein, 98 aa, Oryza sativa
PFLSKTYEMVDDPSTDAVVGWTPAGTSFVVANQPEFCRDLLPKYFKHNNFSSFVRQLNTYGFRKVDPEQWEFANEDFIKGQRHRLKNIHRRKPIFSHS

SEQ ID NO: 66 - protein, 98 aa, Medicago truncatula
PFLIKTYEMVEDAATNHVVSWGPGGASFVVWNPLDFSRDLLPKYFKHNNFSSFIRQLNTYGFRKIDPERWEFANEDFIRGHTHLLKNIHRRKPVHSHS

SEQ ID NO: 67 - protein, 98 aa, Oryza sativa; identical to SEQ ID NO: 66

SEQ ID NO: 68 - protein, 98 aa, Populus trichocarpa
PFLTKTYDMVDDPLTNSVVSWSHSGCSFVVWNPPEFAQDLLPKYFKHNNFSSFVRQLNTYGFRKIDPDQWEFGNEEFIRGQRHILKNIHRRKPVHSHS

SEQ ID NO: 69 - protein, 98 aa, Solanum lycopersicum
PFLLKTYELVDDSYTNPVVSWSHNGRSFVVWNPPEFARDLLPKYFKHNNFSSFIRQLNTYGFRKVDPEQWEFANEDFLRGRRHLLKNIYRRKPIHSHS

SEQ ID NO: 70 - protein, 99 aa, Artificial sequence
  consensus sequence of DNA-binding motif
  misc_feature (4)..(4): Xaa can be any naturally occurring amino acid
  misc_feature (17)..(17): Xaa can be any naturally occurring amino acid
  misc_feature (23)..(25): Xaa can be any naturally occurring amino acid
PFLXKTYEMVDDSSTDXIVSWSXXXNKSFVVWNPPEFARDLLPKYFKHNNFSSFIRQLNTYGFRKIDPERWEFANEDFIRGQKHLLKNIHRRKPVHSHS

SEQ ID NO: 71 - protein, 51 aa, Arabidopsis thaliana
ERAVLQEQMDKLSREKAAIEAKLLKFKQQKVVAKHQFEEMTEHVDDMENRQ

SEQ ID NO: 72 - protein, 50 aa, Medicago truncatula
ERAALEQEIEKLSREKNALQTKLLSYNYLDTEKLQLEDFQRRLDGMEKRQ

SEQ ID NO: 73 - protein, 50 aa, Medicago truncatula; identical to SEQ ID NO: 72

SEQ ID NO: 74 - protein, 51 aa, Medicago truncatula
ERAAFEKEIEKLSQEKNYLESSVLNYKHHQSTAKFQLDNFQQLLDGMEIRQ

SEQ ID NO: 75 - protein, 51 aa, Glycine max
ERAAFEEEIDKLSREKTSLESNIYNFKQHQSTAKPKLEDFLQRLDGIEQRQ

SEQ ID NO: 76 - protein, 51 aa, Glycine max
ERAAFEEEIDKLSREKNSLESNIRNFKQHQSTAKPKLEDFLQRLDGVDKRQ

SEQ ID NO: 77 - protein, 51 aa, Populus trichocarpa
ERAAYEEEIDKLSRDKAKLEASILGFSQQRSSAKLHVEDLTQRIDTMQQRQ

SEQ ID NO: 78 - protein, 51 aa, Populus trichocarpa
ERAAYEEEIEKLARDKAKLKASILGFEQQRSSAKLQVEDLTQKIDTMQQRQ

SEQ ID NO: 79 - protein, 51 aa, Oryza sativa
ERAIFEDEIERLSREKSNLQADLWKSKQQQSGTMNQIEDLERRVLGMEQRQ

SEQ ID NO: 80 - protein, 51 aa, Arabidopsis thaliana
ERVRMNNQIERLTKEKEGLLEELHKQDEEREVFEMQVKELKERLQHMEKRQ

SEQ ID NO: 81 - protein, 51 aa, Arabidopsis thaliana
ERRSMEDQIERLKNEKEGLLAELQNQEQERKEFELQVTTLKDRLQHMEQHQ

SEQ ID NO: 82 - protein, 51 aa, Glycine max
ERQSFTDEIEKLKHDKEQLLVELQKYQHEWQAYEIQMHSSKDRLEKLEQNQ

SEQ ID NO: 83 - protein, 51 aa, Glycine max
ERQSFTDEIEKLKHDKEQLLVELQKYQHEWQAYEIQIHCSKDRLEKLEQNQ

SEQ ID NO: 84 - protein, 51 aa, Medicago truncatula
ERQSMVDEIEKLKQDREQLLMETNRYQHDWETYEIQMHCSKDQLEKLEHKQ

SEQ ID NO: 85 - protein, 51 aa, Glycine max
ERQSFKDEIEKLKHEKEQLLRELEMHEQEWKMYEVQLQHSNDRLEKLEKKQ

SEQ ID NO: 86 - protein, 51 aa, Glycine max
ERRSFKDEIEKLKHEKERLLRELERHEQEWKMYEVQLQHSNDCLEKLEKKQ

SEQ ID NO: 87 - protein, 51 aa, Populus trichocarpa
ERQSMKDDIEKLKRDKQALILELQKQEQERKGFEMQIEGLKEKLQQTECIQ

SEQ ID NO: 88 - protein, 51 aa, Solanum lycopersicum
ERQGYKEDIEKLKHENESLHLVLHRHKQDHQGLEMQMQVLNQRVQQVKDRQ

SEQ ID NO: 89 - protein, 51 aa, Oryza sativa
ERKDYEEEIERLKSDNAALSSELQNNTLKKLNMEKRMQALEEKLFVVEDQQ

SEQ ID NO: 90 - protein, 51 aa, Oryza sativa
ERRELEEEINRLKYEKSILVADLQRQNQQQYVINWQMQAMEGRLVAMEQRQ

SEQ ID NO: 91 - protein, 51 aa, Oryza sativa; identical to SEQ ID NO: 90

SEQ ID NO: 92 - protein, 51 aa, Populus trichocarpa
EKQEYEKEINRLKHDKNELELELQRNEAEKQGFEFQIVSLGERLQSMECRQ

SEQ ID NO: 93 - protein, 51 aa, Solanum lycopersicum
ERQEYEDEIERLKRENSLLQSSAENQLKFNGEYESGIKSMEQRLQNVAHRQ

SEQ ID NO: 94 - protein, 51 aa, Artificial sequence
  consensus sequence of oligomerisation sequence
  misc_feature (3)..(3): Xaa can be any naturally occurring amino acid
  misc_feature (14)..(14): Xaa can be any naturally occurring amino acid
  misc_feature (17)..(18): Xaa can be any naturally occurring amino acid
  misc_feature (20)..(20): Xaa can be any naturally occurring amino acid
  misc_feature (24)..(24): Xaa can be any naturally occurring amino acid
  misc_feature (26)..(27): Xaa can be any naturally occurring amino acid
  misc_feature (29)..(33): Xaa can be any naturally occurring amino acid
  misc_feature (38)..(39): Xaa can be any naturally occurring amino acid
  misc_feature (41)..(42): Xaa can be any naturally occurring amino acid
  misc_feature (46)..(46): Xaa can be any naturally occurring amino acid
  misc_feature (49)..(49): Xaa can be any naturally occurring amino acid
ERXAFEDEIEKLKXEKXXLXAELXKXXQXXXXXELQLXXLXXRLDXMEXRQ

SEQ ID NO: 95 - protein, 13 aa, Arabidopsis thaliana
NDVFWEQFLTERP

SEQ ID NO: 96 - protein, 13 aa, Medicago truncatula
NDVFWENFLTERP

SEQ ID NO: 97 - protein, 13 aa, Medicago truncatula
NDVFWENFLTERP

SEQ ID NO: 98 - protein, 11 aa, Medicago truncatula
NDLFWEQFLTE

SEQ ID NO: 99 - protein, 13 aa, Glycine max
NDVFWEQFLTERP

SEQ ID NO: 100 - protein, 13 aa, Glycine max
NDVFWEQFLTERP

SEQ ID NO: 101 - protein, 13 aa, Populus trichocarpa
NDGFWEQFLTERP

SEQ ID NO: 102 - protein, 13 aa, Populus trichocarpa
NDVFWEQFLTERP

SEQ ID NO: 103 - protein, 13 aa, Oryza sativa
NDKFWEQFLTERP

SEQ ID NO: 104 - protein, 13 aa, Arabidopsis thaliana
NDGFWQQFFSENP

SEQ ID NO: 105 - protein, 13 aa, Arabidopsis thaliana
NDDFWEQCLTENP

SEQ ID NO: 106 - protein, 13 aa, Glycine max
NDVFWEQFLTEDP

SEQ ID NO: 107 - protein, 13 aa, Glycine max
NDVFWEQFLTEDP

SEQ ID NO: 108 - protein, 13 aa, Medicago truncatula
NDVFWEQFLTEDP

SEQ ID NO: 109 - protein, 13 aa, Medicago truncatula
NDIFWERFLTENP

SEQ ID NO: 110 - protein, 13 aa, Glycine max
NDIFWERFLTENP

SEQ ID NO: 111 - protein, 13 aa, Populus trichocarpa
NDVFWEQFLTENP

SEQ ID NO: 112 - protein, 13 aa, Solanum lycopersicum
NDVFWEQFLTENP

SEQ ID NO: 113 - protein, 13 aa, Oryza sativa
NDGFWQQFLTEQP

SEQ ID NO: 114 - protein, 13 aa, Oryza sativa
NDVFWERFLTETP

SEQ ID NO: 115 - protein, 13 aa, Oryza sativa
NDVFWERFLTETP

SEQ ID NO: 116 - protein, 13 aa, Populus trichocarpa
NDLFWQHFLTEAP

SEQ ID NO: 117 - protein, 13 aa, Solanum lycopersicum
NDVFWQQFLTETP

SEQ ID NO: 118 - protein, 13 aa, Artificial sequence
  consensus sequence of AHA domain (activation motif)
  misc_feature (12)..(12): Xaa can be any naturally occurring amino acid
NDVFWEQFLTEXP

SEQ ID NO: 119 - protein, 33 aa, Arabidopsis thaliana
IFHQNFSNKLRLELSPADSDMNMVSHSIQSSNE

SEQ ID NO: 120 - protein, 33 aa, Medicago truncatula
VFPHDISNKLRLELSPAVSDMNLISGSTQGSNE

SEQ ID NO: 121 - protein, 33 aa, Medicago truncatula; identical to SEQ ID NO: 120

SEQ ID NO: 122 - protein, 33 aa, Medicago truncatula
VFHQNFLNKLRLELSPSVSDMNLVSGSTHVSTE

SEQ ID NO: 123 - protein, 33 aa, Glycine max
VFHQDFSNKLRLELSPAVSDMNLVSRSTQSSNE

SEQ ID NO: 124 - protein, 33 aa, Glycine max
VFRQDFSNKLRLELSPAVSDMNLVSRSTQSSNE

SEQ ID NO: 125 - protein, 33 aa, Populus trichocarpa
VIHQDFSNKLRLELSPAVSDINLISRSTQSSNE

SEQ ID NO: 126 - protein, 33 aa, Populus trichocarpa
VIHQDFPDKLRLELSPAVSDINLVSHSTQSSNE

SEQ ID NO: 127 - protein, 32 aa, Oryza sativa
LNQHFSDKLRLGLCPAMTESNIITLSTQSSNE

SEQ ID NO: 128 - protein, 10 aa, Arabidopsis thaliana
SCHLNLTLAS

SEQ ID NO: 129 - protein, 10 aa, Medicago truncatula
SCQLNLTLAS

SEQ ID NO: 130 - protein, 10 aa, Medicago truncatula
SCQLNLTLAS

SEQ ID NO: 131 - protein, 10 aa, Medicago truncatula
SRQLNLTLAS

SEQ ID NO: 132 - protein, 10 aa, Glycine max
SCQLNLTLAS

SEQ ID NO: 133 - protein, 10 aa, Glycine max
SCQLNLTLAS

SEQ ID NO: 134 - protein, 10 aa, Populus trichocarpa
SCQLNLTLAS

SEQ ID NO: 135 - protein, 10 aa, Populus trichocarpa
SCQLNLSLAS

SEQ ID NO: 136 - protein, 10 aa, Oryza sativa
TCHLSLTLAS

SEQ ID NO: 137 - protein, 14 aa, Arabidopsis thaliana
HQVEQLESSIAIWE

SEQ ID NO: 138 - protein, 14 aa, Arabidopsis thaliana
EQVEKLESSLTFWE

SEQ ID NO: 139 - protein, 14 aa, Glycine max
ERLDQLESSMAFWE

SEQ ID NO: 140 - protein, 14 aa, Glycine max
ERLDQLESSMAFWE

SEQ ID NO: 141 - protein, 14 aa, Medicago truncatula
ERLDQLEASVAFWE

SEQ ID NO: 142 - protein, 14 aa, Glycine max
ERLDLLESSMTFWE

SEQ ID NO: 143 - protein, 14 aa, Glycine max
ERLDLLESSMTFWE

SEQ ID NO: 144 - protein, 14 aa, Populus trichocarpa
EQFEQLESSLTFWE

SEQ ID NO: 145 - protein, 14 aa, Solanum lycopersicum
EVLDQLESSLTFWE

SEQ ID NO: 146 - protein, 14 aa, Oryza sativa
ESFDKMESSLNSLE

SEQ ID NO: 147 - protein, 14 aa, Oryza sativa
EAFDRVELSLVSLE

SEQ ID NO: 148 - protein, 14 aa, Oryza sativa
EAFDRVELSLVSLE

SEQ ID NO: 149 - protein, 14 aa, Populus trichocarpa
ESVEKLDSSLKFLE

SEQ ID NO: 150 - protein, 14 aa, Solanum lycopersicum
EMVKKLDSSINFWE

SEQ ID NO: 151 - protein, 14 aa, Artificial sequence
  consensus sequence of HSFA4 motif
  misc_feature (2)..(2): Xaa can be any naturally occurring amino acid
  misc_feature (5)..(5): Xaa can be any naturally occurring amino acid
  misc_feature (11)..(12): Xaa can be any naturally occurring amino acid
EXLDXLESSMXXVE

SEQ ID NO: 152 - DNA, 56 bp, Artificial sequence
  primer: prm10434
ggggacaagtttgtacaaaaaagcaggcttaaacaatgaattctgcaccacaatcc

SEQ ID NO: 153 - DNA, 49 bp, Artificial sequence
  primer: prm10435
ggggaccactttgtacaagaaagctgggtagacagcatgctcaaagggt

SEQ ID NO: 154 - DNA, 2194 bp, Oryza sativa
aatccgaaaagtttctgcaccgttttcaccccctaactaacaatatagggaacgtgtgctaaatataaaatgagaccttatatatgtagcgctgataactagaactatgcaagaaaaactcatccacctactttagtggcaatcgggctaaataaaaaagagtcgctacactagtttcgttttccttagtaattaagtgggaaaatgaaatcattattgcttagaatatacgttcacatctctgtcatgaagttaaattattcgaggtagccataattgtcatcaaactcttcttgaataaaaaaatctttctagctgaactcaatgggtaaagagagagattttttttaaaaaaatagaatgaagatattctgaacgtattggcaaagatttaaacatataattatataattttatagtttgtgcattcgtcatatcgcacatcattaaggacatgtcttactccatcccaatttttatttagtaattaaagacaattgacttatttttattatttatcttttttcgattagatgcaaggtacttacgcacacactttgtgctcatgtgcatgtgtgagtgcacctcctcaatacacgttcaactagcaacacatctctaatatcactcgcctatttaatacatttaggtagcaatatctgaattcaagcactccaccatcaccagaccacttttaataatatctaaaatacaaaaaataattttacagaatagcatgaaaagtatgaaacgaactatttaggtttttcacatacaaaaaaaaaaagaattttgctcgtgcgcgagcgccaatctcccatattgggcacacaggcaacaacagagtggctgcccacagaacaacccacaaaaaacgatgatctaacggaggacagcaagtccgcaacaaccttttaacagcaggctttgcggccaggagagaggaggagaggcaaagaaaaccaagcatcctccttctcccatctataaattcctccccccttttcccctctctatataggaggcatccaagccaagaagagggagagcaccaaggacacgcgactagcagaagccgagcgaccgccttctcgatccatatcttccggtcgagttcttggtcgatctcttccctcctccacctcctcctcacagggtatgtgcctcccttcggttgttcttggatttattgttctaggttgtgtagtacgggcgttgatgttaggaaaggggatctgtatctgtgatgattcctgttcttggatttgggatagaggggttcttgatgttgcatgttatcggttcggtttgattagtagtatggttttcaatcgtctggagagctctatggaaatgaaatggtttagggatcggaatcttgcgattttgtgagtaccttttgtttgaggtaaaatcagagcaccggtgattttgcttggtgtaataaagtacggttgtttggtcctcgattctggtagtgatgcttctcgatttgacgaagctatcctttgtttattccctattgaacaaaaataatccaactttgaagacggtcccgttgatgagattgaatgattgattcttaagcctgtccaaaatttcgcagctggcttgtttagatacagtagtccccatcacgaaattcatggaaacagttataatcctcaggaacaggggattccctgttcttccgatttgctttagtcccagaattttttttcccaaatatcttaaaaagtcactttctggttcagttcaatgaattgattgctacaaataatgcttttatagcgttatcctagctgtagttcagttaataggtaatacccctatagtttagtcaggagaagaacttatccgatttctgatctccatttttaattatatgaaatgaactgtagcataagcagtattcatttggattattttttttattagctctcaccccttcattattctgagctgaaagtctggcatgaactgtcctcaattttgttttcaaattcacatcgattatctatgcattatcctcttgtatctacctgtagaagtttctttttggttattccttgactgcttgattacagaaagaaatttatgaagctgtaatcgggatagttatactgcttgttcttatgattcatttcctttgtgcagttcttggtgtagcttgccactttcaccagcaaagttc

SEQ ID NO: 155 - DNA, 2205 bp, Arabidopsis thaliana
atggctgcgattgaattacacaagccggagatcaacgccgatgacgacgatgacgaatccccggtggagcaggttcgtctcactgtatcgaaccacgacgatccttctctaccagtgtggacgtttcggatgtggtttttagggcttctctcttgtattctcctctcgtttctcaacactttcttcggatacagaactcagcctctgatgatcactatgatctctgttcaagttgttacgttgcctttagggaagcttatggctagggttttgcctgagaccaagtataagattggttcgtgggagttttcttttaatccgggtccctttaacgtcaaggaacatgtgttgatctctatgtttgctaatgctggtgctggatttggatctggtactgcttacgctgttggtattgttgatatcatcatggctttttataaaaggaagattagtttcttggctagttggattcttgtcatcactactcagattcttgggtatggttgggctggtatcatgagaaagttagttgttgatcctgcacagatgtggtggcctacgagtgttcttcaagtctctctgtttcgtgctcttcatgagaaggacaatgcaagaatgtcacgaggaaagttctttgtgattgcgtttgtttgtagcttcgcgtggtacatattcccagcttatttgttcttgaccttatcatcaatatcttgggtttgttgggcattcccgaagtctatcacagctcagcagttaggatctggaatgtcaggacttgggattggtgcatttgctcttgattggtctgttatagcttcttaccttggaagccctcttgtgactcctttctttgcaattgtcaatgtccttgttggttacgttttggtcatgtatatggttataccaatatcatattggggcatgaatgtgtatgaagcaaacaagtttccaattttctcctctgatctgtttgataagcaagggcaactttacaatatctccaccattgtcaacaacaagtttgaattggacatggagaattatcaacaacaaggtcgggtttatctcagtacgttctttgctatcagttacgggattggtttcgcagcaatcgtttccacactgactcatgttgctctcttcaatggaaagggaatttggcaacaagtacgagcttcaactaaagctaaaatggacatacacacaaggttgatgaagaagtacaaagacataccaggttggtggttttacagtctgcttgcgatctcattggtgctatctcttgtcctctgcattttcatgaaagacgagatccaaatgccttggtggggactccttctagcatcattcatggcccttacattcactgtaccagtcagcattatcacagctactactaatcagactccaggtctgaacattatcacagaatatctcatgggtgtgttgttaccggggagaccaatagctaacgtctgcttcaaaacttatgggtacataagcatgtcacaagctatatcattccttaacgacttcaagctaggccattacatgaagataccaccaagatcgatgttcttagtccagttcataggaacggtgatagcaggaacagtgaatatatcagtggcatggtacttgctgacatcagtagaaaacatctgccagaaggagttgcttcctccaaacagtccatggacatgtccaagtgacagagttttcttcgacgcatcagtgatttggggattagtaggacccaagagaatctttggtcggctaggaaactaccctgcactaaactggttcttcttaggtggactaataggaccggtcctcgtgtggcttctccaaaaagccttcccaacgaaaacatggatctcgcagatcaatctcccagttcttttaggagcaacagcagcaatgccgccagcgacaagcgtgaacttcaactgctggatcatagtaggagtgatattcaattactttgtgttcaagtactgcaaaaagtggtggcagaggtataactacgtgctatcggcagctttggatgcgggattggcgttcatgggagtgttgttatactttagtttgacgatgaatggaatatcgataaatcattggtggggtgctaagggtgagaattgtcctcttgcttcttgtcctactgctcctggtgttctagttgatggttgtcctgttttttaa

SEQ ID NO: 156 - protein, 734 aa, Arabidopsis thaliana
MAAIELHKPEINADDDDDESPVEQVRLTVSNHDDPSLPVWTFRMWFLGLLSCILLSFLNTFFGYRTQPLMITMISVQVVTLPLGKLMARVLPETKYKIGSWEFSFNPGPFNVKEHVLISMFANAGAGFGSGTAYAVGIVDIIMAFYKRKISFLASWILVITTQILGYGWAGIMRKLVVDPAQMWWPTSVLQVSLFRALHEKDNARMSRGKFFVIAFVCSFAWYIFPAYLFLTLSSISWVCWAFPKSITAQQLGSGMSGLGIGAFALDWSVIASYLGSPLVTPFFAIVNVLVGYVLVMYMVIPISYWGMNVYEANKFPIFSSDLFDKQGQLYNISTIVNNKFELDMENYQQQGRVYLSTFFAISYGIGFAAIVSTLTHVALFNGKGIWQQVRASTKAKMDIHTRLMKKYKDIPGWWFYSLLAISLVLSLVLCIFMKDEIQMPWWGLLLASFMALTFTVPVSIITATTNQTPGLNIITEYLMGVLLPGRPIANVCFKTYGYISMSQAISFLNDFKLGHYMKIPPRSMFLVQFIGTVIAGTVNISVAWYLLTSVENICQKELLPPNSPWTCPSDRVFFDASVIWGLVGPKRIFGRLGNYPALNWFFLGGLIGPVLVWLLQKAFPTKTWISQINLPVLLGATAAMPPATSVNFNCWIIVGVIFNYFVFKYCKKWWQRYNYVLSAALDAGLAFMGVLLYFSLTMNGISINHWWGAKGENCPLASCPTAPGVLVDGCPVF

SEQ ID NO: 157 - DNA, 2364 bp, Arabidopsis thaliana
tcttgttcaccatctctcttatttcgcagatctaaagagaaaaaaaccatgagaaaaggaggtttaactcctgacagagatcgtcagattgaggaacatgagttgcaagaaactgggataagtcctgacatagagaggttaaagaggaacattaatgctacaccataccaaagagaagaagaggaagaagatagagaggaacaggaagaatccgtggagggaatattcgaaagcagagaggttccttcgtggaagaagcagttaacaattagggcttttgtggttagctttgcgctaagcattttgtttagcttcattgtgatgaagcttaacctcacaacaggaatcattccttcgcttaatgtatctgctggtcttttggggttcttcttcgtcaagacatggactaagatgcttcataaatctggtcttttgaaacagccctttacaagacaagagaacaccgttattcagacttgtgtagttgcttcctcaggaattgcctttagcggaggatttgggacttacctatttgcaatgagccatcgaatagcagaccaatcaggagacgttgcccgtggcgttaaggatccttcattgggttggatgatagcttttctctttgttgtcagctttcttggcctcttctctgttgttcctcttagaaagataatgataatagacttcaaactaccatacccaagtggcactgcaactgctcatcttatcaacagctttcatactcctcaaggggcaaagctagccaagaaacaagtccgagtcttggggaaattcttctccttcagcttcttttggggtttcttccaatggttctttactgcaggtgaaaattgtgggtttaacagcttccctacttttggactcagagcttaccaatataagttctactttgatttttctgcaacatatgtgggtgttggtatgatatgcccatacataatcaacatctctcttctattgggtggaattctctcttggggactaatgtggcctctcattgaaaccagaaaaggagattggttcccttctaatgttgactctagcagcatgaacggtcttcaggcttacaaggtgttcatagctgtcgctacgatcctaggagatggtctatacaacttttgcaaggtgttgatccgaaccttttcaggactgatctcgcagatccgaggtaaagctggttcgagaagctctcttgcacacaaagaagaccctcctgcttcccctgcttccccattgaccccaaggatatcttatgatgaccaacgacgaacaagattcttcctcaaggatcaaataccgtcttggtttgctgttggaggctatgtggttatatctgcagtgtctacagctatacttcctcacatgttctctcagctgagatggtactacattatagtcatctatatctttgctcctatcttagctttctgcaatgcttacggagccgggctcactgattggtcgctagcatcaacctatggaaagcttgccatatttacaattggagcatgggctggttcggatcatggaggtcttctggcaggcttagcggcttgtggagtcatgatgaatatagtatcgacagcttcagacctgacgcaggatttcaaaactggttacctaacattgtcatctccaagagccatgtttgtgagccaggtaattggaacagctatgggctgcttggtttcaccctgcgtattctggcttttctacaaggcgtttgatgatcttggtctaccaaacagtgaataccctgctccgtttgctactgtgtaccgaagtatggctaaactcggggttgaaggcgtctcgtctctaccaagagactgtcttatgctgtgctacgtgtttttcggtgtggccatactcattaacttaataaaagattgtcttggtaacaggtggggaaggtttgttcctcttcccatggcaatggctataccgtttttcttggggccttactttgcaattgacatgtgcgtggggagttttattttgtttgtctgggagaggttagatgcgccaaaggctgaagcatttgcaacagcagtggcttctggtttgatatgtggagatggaatctggactttgccaagttcagtgcttgctatagctggagttaaacctcctatttgcatgaagtttctttcagctgcaactaatcacagagtcgacaagttcctgcaaggatcctcttagtttttttttaagctaaatgagatggatctgttgagaagtaaagtgttagtttttttaaagctcaatgagatggatctgttgaagaagtaaagtgtaatgatgattcagttttgaaaacaatgataagaggtatattgcgtt

SEQ ID NO: 158 - protein, 724 aa, Arabidopsis thaliana
MRKGGLTPDRDRQIEEHELQETGISPDIERLKRNINATPYQREEEEEDREEQEESVEGIFESREVPSWKKQLTIRAFVVSFALSILFSFIVMKLNLTTGIIPSLNVSAGLLGFFFVKTWTKMLHKSGLLKQPFTRQENTVIQTCVVASSGIAFSGGFGTYLFAMSHRIADQSGDVARGVKDPSLGWMIAFLFVVSFLGLFSVVPLRKIMIIDFKLPYPSGTATAHLINSFHTPQGAKLAKKQVRVLGKFFSFSFFWGFFQWFFTAGENCGFNSFPTFGLRAYQYKFYFDFSATYVGVGMICPYIINISLLLGGILSWGLMWPLIETRKGDWFPSNVDSSSMNGLQAYKVFIAVATILGDGLYNFCKVLIRTFSGLISQIRGKAGSRSSLAHKEDPPASPASPLTPRISYDDQRRTRFFLKDQIPSWFAVGGYVVISAVSTAILPHMFSQLRWYYIIVIYIFAPILAFCNAYGAGLTDWSLASTYGKLAIFTIGAWAGSDHGGLLAGLAACGVMMNIVSTASDLTQDFKTGYLTLSSPRAMFVSQVIGTAMGCLVSPCVFWLFYKAFDDLGLPNSEYPAPFATVYRSMAKLGVEGVSSLPRDCLMLCYVFFGVAILINLIKDCLGNRWGRFVPLPMAMAIPFFLGPYFAIDMCVGSFILFVWERLDAPKAEAFATAVASGLICGDGIWTLPSSVLAIAGVKPPICMKFLSAATNHRVDKFLQGSS

SEQ ID NO: 159 - DNA, 2212 bp, Arabidopsis thaliana
aagaagaagaaactctgtttttttgttctgttcttggaaaaaaatgaggagtatgatgatggagagagagggaaggaatgagatagaaagagaagtaatagatgacttggaagagacgcaaaacgaaggagatgatttcaagtcaatacctccatggaaggaacaaatcactttcagaggaattgttgcaagtttaatcattggtataatctacagtgtgatcgtgatgaaactaaacctaacaacaggtttggtcccaaacctaaatgtctctgcagcacttttagcctttgtcttccttagaagctggaccaagctgttgaccaaagccgggattgtgactaaaccgttcactaaacaagagaacactgttgtccaaacatgtgctgttgcttgttacagcattgcagttggaggtgggtttggttcataccttcttggtttgaacagaattacttatgaacagtcaggaggaactcacactgatgggaattatccggaaggcacgaaagagcctggaatcggttggatgaccgctttcttgttctttacttgctttgttggtcttttagcattggttcctctaagaaagatcatgatcatagactacaagctgacatatccaagtggaacagctaccgcggttttgatcaacggtttccacactcctaaaggcaataaaatggccaagaaacaagtgtttgggtttgtgaagtacttctcatttagcttcatttgggctttcttccaatggttcttctctggtggtacagagtgcggtttcattcagtttccaactttcgggttagaagctttgaagaacacattctacttcgactttagcatgacatacgttggagcaggaatgatctgtccccatattgtcaatatatctttgctttttggcgcggttctgtcttggggaatcatgtggccactcattaaaggtcttaaaggagattggttcccatcaactcttcctgaaaacagcatgaagagtctcaatggttacaaggtgtttatatcaatctcattgatcctcggagacgggctttaccaattcatcaagatactttttaagacaggaataaacatgtacgtcaagttaaacaatcgcaactctgggaaatctaattcggagaaagataagcaatctattgcagatcttaaaagagatgagatctttgtaagagacagcattccattatgggttgcagcagtaggatacgcagcgttctctgttgtctcgatcatcgcgatccctataatgttccccgagctgaaatggtacttcatagtcgtagcttacatgttagctccatcgttaggtttcagtaacgcttatggagcagggctaacagatatgaacatggcttataactatggtaaagtcgctctgtttatcttagccgctatggcagggaaacaaaatggtgtagtcgcgggacttgtcggatgcgggttgataaaatcgattgtatcgatttcttctgacctaatgcacgatttcaagacaggacatttgactctgacttcacctaggtcgatgcttgtgagtcaagcgatcggtacagcgatcggatgcgttgtggcgcctctaactttcttcttgttttataaagctttcgatgtcgggaaccaggagggagagtacaaagctccttacgctttggtatacagaaacatggcaattcttggagttgaaggtttctctgctttgcctcaacattgtttacagctttgttacgggtttttcgcattcgcggtggcggcaaatctcgttagggataggttaccggataagatagggaattgggttccattaccgatggcaatggcggttccgtttcttgttggagggtactttgctattgatatgtgtgtgggaagtttgattgtgtttgcttggaatatgagagatcgagttaaagccggtttaatggtaccggcggttgcttccggtttgatatgtggagatggtctatggattttgccgtcgtcggttcttgctttggccggcgttagacctcctatatgtatgggcttcatgccgagtaaatattcgagttaaagatagctttttacgagtttttacttttttgtgtagcgacaaaaaaattagctaaagaattgtggaaacaaaaaaaacagtttatataggaattgtactttgtaagtttgtatacacaataaagtaataaactagtctctc

SEQ ID NO: 160 - protein, 688 aa, Arabidopsis thaliana
MEVERSKKDDDLNNGSKSNEEEEISVERIFEESNEIPPPWQKQLTFRALIVSFILAILFTFVVMKLNLTTGIIPSLNISAGLLGFFFVKSWTKILNKAGFLKQPFTRQENTVIQTCVVASSGIAFSGGFGSYLFGMSDVVAKQSAEANTPLNIKNPHLGWMIGFLFVVSFLGLFSVVPLRKIMIVDFKLTYPSGTATAHLINSFHTPQGAKLAKKQVRALGKFFSFSFLWGFFQWFFATGDGCGFANFPTFGLKAYENKFYFDFSATYVGVGMICPYLINVSLLIGAILSWGVMWPLIGAQKGKWYAADLSSTSLHGLQGYRVFIAIAMILGDGLYNFIKVLGRTVFGLYKQFKNKDVLPINDHTSTAPVTISYDDKRRTELFLKDRIPSWFAVTGYVVLAIVSIITVPHIFHQLKWYHILIMYIIAPVLAFCNAYGCGLTDWSLASTYGKLAIFTIGAWAGASNGGVLAGLAACGVMMNIVSTASDLMQDFKTGYMTLASPRSMFLSQAIGTAMGCVISPCVFWLFYKAFPDFGQPGTAYPAPYALVYRNMSILGVEGFSALPKHCLMLCYIFFAAAVIVNGIRDALGPKWARFIPLPMAMAIPFYLGGYFTIDMCLGSLILFIWRKLNKPKADAYSSAVASGLICGEGIWTLPSSILALAGVKAPICMKFLSMASNNKVDAFLNPS

SEQ ID NO: 161 - DNA, 2396 bp, Arabidopsis thaliana
gagtccaagttgactccttcgagctttgattctcgttccaataatacttcctccaccatctctcctcctctcgttagatctaagaaacagagaaaacaagagagatagaatgagaaagggagttctaaatcctgacagagatcgtcagatagtggaacatgagttgcaggaaactgggtttagtccagaaacagagaaagtcaagaacaagaattttgaagaagatgaagaggaagaagatgaatctgtggagaagatatttgagagtagagaagtaccttcttggaagaagcagttgacggtgagggcttttgtggtgagctttatgctaagcatcttgtttagtttcattgttatgaagcttaacctcacaacgggaatcatcccttcgctcaatgtctctgctggtcttttgggtttcttctttgtcaagacatggactaagatgctccataggtctggtctcttgaaacagccatttactcgccaggagaatactgttattcagacctgtgttgttgcctcttctggcattgccttcagcggaggttttgggacatacctctttggcatgagtgaacgaattgcgacccaatcaggagatgtatcccgtggcgtcaaggacccttctttgggttggattatcggtttcctctttgtcgtcagctttcttggcctcttctcagttgtccccctgcgaaagataatggtaatagacttcaaactaacatacccaagtggtactgcaacagctcatcttatcaacagctttcacacccctcaaggcgccaagctagccaagaaacaagtgagggtgttggggaaatttttctctttaagcttcttctggagtttcttccaatggttctttaccggaggagaaaattgtgggttctccaacttcccaacatttggactcaaagcttaccagtacaagttctactttgatttttcagcaacatatgttggtgttggaatgatatgtccgtatataatcaacatctctgtcctattgggaggaatcctctcttgggggataatgtggcccctcattgaaaccaaaaagggagattggttccctgataatgtcccatccagcagcatgcatggtctccaagcttacaaggtgtttatagctgttgctataatcctaggagatggcttatacaacttttgcaaggtgctgagccggactctttcaggattatttgtacagctccgaggccctactacatctatttcaagaacctccttcacacttgaagaagaccctcatgcttccccactaagcccaaagcaatcttatgatgaccaacgtcgtacaagattcttcctcaaagaccaaatccctacttggtttgctgttggaggttatatcacaatagctgcaacatctacagcgatactccctcacatgttccaccagctgagatggtattacattctggtcatctatatctgcgcgcctgtcttagctttctgtaacgcttatggagctggactcacagactggtccttggcttcaacttatggaaagttagccatattcacaattggagcttgggctggctctgagcacggtggtatgctggctggtctagcagcatgtggtgtcatgatgaacatagtctcgacagcttcggatctaacacaagacttcaagacaggctacctcactttatcatctccaaagtcaatgtttgtgagccaagtgattggaacagcaatgggttgtgtggtatctccttgcgtgttctggctattctacaaagcgtttgatgatttaggcctcccaaacactgaataccctgctccatttgctactgtatatcgaagcatggctaaactaggagtggaaggtgtcgcatctctaccgagagaatgtcttgttctatgctacgcgttcttcggtgtggcgattctcgtaaacatagtaaaagatagtctccatagcaattggggaaggttcattccacttcccatggcaatggctataccgtttttcttgggaccttacttcgcaattgacatgtgtgtgggaagtttgatactttttatctgggaaagagtagatgcagccaaggctgaagcttttgggacagcggtggcttctggtttgatatgcggagatggcatttggtctttgccgagctccgtgctcgctatagccggagttaatcctcctgtttgcatgaagtttctctcttctgcaaccaattcaaaggtcgacaacttcctgaaaggatccatttaaaactcaaataagtaacaacatctcaaccatgtgaaagtgtaatgatgcttcaattgttcttttaccattatgacgattttgaatgtaactcgtatataaagatcttagatatgaaagggctctgattgatgattgtcaaaac

SEQ ID NO: 162 - protein, 714 aa, Arabidopsis thaliana
MRKGVLNPDRDRQIVEHELQETGFSPETEKVKNKNFEEDEEEEDESVEKIFESREVPSWKKQLTVRAFVVSFMLSILFSFIVMKLNLTTGIIPSLNVSAGLLGFFFVKTWTKMLHRSGLLKQPFTRQENTVIQTCVVASSGIAFSGGFGTYLFGMSERIATQSGDVSRGVKDPSLGWIIGFLFVVSFLGLFSVVPLRKIMVIDFKLTYPSGTATAHLINSFHTPQGAKLAKKQVRVLGKFFSLSFFWSFFQWFFTGGENCGFSNFPTFGLKAYQYKFYFDFSATYVGVGMICPYIINISVLLGGILSWGIMWPLIETKKGDWFPDNVPSSSMHGLQAYKVFIAVAIILGDGLYNFCKVLSRTLSGLFVQLRGPTTSISRTSFTLEEDPHASPLSPKQSYDDQRRTRFFLKDQIPTWFAVGGYITIAATSTAILPHMFHQLRWYYILVIYICAPVLAFCNAYGAGLTDWSLASTYGKLAIFTIGAWAGSEHGGMLAGLAACGVMMNIVSTASDLTQDFKTGYLTLSSPKSMFVSQVIGTAMGCVVSPCVFWLFYKAFDDLGLPNTEYPAPFATVYRSMAKLGVEGVASLPRECLVLCYAFFGVAILVNIVKDSLHSNWGRFIPLPMAMAIPFFLGPYFAIDMCVGSLILFIWERVDAAKAEAFGTAVASGLICGDGIWSLPSSVLAIAGVNPPVCMKFLSSATNSKVDNFLKGSI

SEQ ID NO: 163 - DNA, 2471 bp, Arabidopsis thaliana
aacctccaaaatccgtcaaactcaacattttctcttccgccataaccaattttctctagatccacggatccatttttctcgggaaaattcgaaatccgccggtgaaaagaaactcattcattgaattagctaaaacatggggacggagatccctagatcggcggagatatcagaggcattgttaccaccggaatctgagaaaaccgtgacggcgacggaggagcatgtacctgagtggaaagagcagataacgattcgaggattaaccgtgagtgcgttgctcgggactttgttctgtatcattactcataaactaaatctgacggttggaatcatcccgtcgttgaacgtcgctgcgggattactcggtttcttcttcgttaagtcgtggactggtttcttatcgaagctagggtttacagtgaagcctttcactaagcaagagaacaccgttattcagacttgtgttgtcgcttgctatggcctcgcctttagcggaggatttggttcatatttgattgctatggatgagaagacatataagctcattggtgctgattatcctggaaaccatgcagaagatgttataaatccaggattgtggtggatgattgggtttttatttgtagtcagcttcttgggactctttagtctcgttccgttacgcaaggtgatggttttggactacaaacttacttatcctagtggaaccgccacagcaatgttgattaatagcttccacaccaacactggagctgagcttgcagggaaccaggttaaatgtcttggaaaatacctgagccttagcttaatttggagttgtttcaaatggttcttcagtggtattggagatgcatgtggatttgataacttccccacccttggtttgacgttattcaagaacacgttttactttgacttcagtcctacttatattggatgcggccttatatgcccccatatagtgaactgctcggttcttctcggtgcgatcatttcttgggggattctatggccatttgtatcacagcatgctggggattggtatcctgctgaccttgggtccaacgatttcaaaggtctctacgggtataaggtctttatcgccattgccattatccttggtgatggtctttacaatcttgtcaagatcatcgctgtcactgtgaaggaattatgcagcagcaggtctagacgactcaatctacccattgttaccgacggtgtagatgacagtgaagcttctgagatactgctggtgaagaagaaaagagatgaagtgtttctgaaggaccgtataccccttgaatttgcgattgctggttatgtgggtcttgcagctatctcaactgccacaatcccaataatatttccaccactgaaatggtactttgtcctgtgttcttatttcattgcacccgctctcgccttctgcaactcttatggaacggggctcacagactggagcctagcatcaacctatggaaagatcggtcttttcataatcgcttccgttgtaggaagtgatggtggtgtcattgcgggtttagctgcctgtggtgttatgatgtcaatcgtctccaccgcagctgatctcatgcaagacttcaaaacaggttacctcactttatcatctgcaaagtccatgtttgtaagccagctcgtgggaaccgcaatgggctgtgtaatcgctccactcacattctggctgttctggactgcctttgacattggagatcccaatggtccgtacaaagcaccttacgcagtgattttccgtgaaatggcgattctcggaattgagggctttgctgaattgcctaagcactgtttggctctttgttacgggtttttcatagcagctttgattgtgaatctcttaagagatattacaccgcctaagatctctcagttcatcccgatcccaatggcaatggctgtcccattctacattggagcttacttcgccattgacatgtttgttgggactgtgatattgttcgtatgggaacggatcaacaggaaagatgcagaggactttgcaggtgcagtagcatcaggactgatctgtggtgatgggatctggactataccatccgcaatcctttcaatcttaaggatcaaccctcccatttgtatgtactttggaccgtcctcagcaagatagagatgccactgtggtcataatcgcaaccgcaactgtgagtcatacaaaaggaaacttatccgagagtcttgtggccgtcagaatcgaaacagttgtcttcatatgttgtgtagatatgtttagtatctcagctcgcaagaacaaaatgttgttgcaaatctcttcaaatgttttagtcaatgttgttgtatgtccccgggatgttgtctccttgaatgctttcattcacaagctcaaagagttttacgaacatttgccttgttcaatcatcataaggagtgaatgcagatgaaataatgtactg

SEQ ID NO: 164 - protein, 676 aa, Arabidopsis thaliana
MGTEIPRSAEISEALLPPESEKTVTATEEHVPEWKEQITIRGLTVSALLGTLFCIITHKLNLTVGIIPSLNVAAGLLGFFFVKSWTGFLSKLGFTVKPFTKQENTVIQTCVVACYGLAFSGGFGSYLIAMDEKTYKLIGADYPGNHAEDVINPGLWWMIGFLFVVSFLGLFSLVPLRKVMVLDYKLTYPSGTATAMLINSFHTNTGAELAGNQVKCLGKYLSLSLIWSCFKWFFSGIGDACGFDNFPTLGLTLFKNTFYFDFSPTYIGCGLICPHIVNCSVLLGAIISWGILWPFVSQHAGDWYPADLGSNDFKGLYGYKVFIAIAIILGDGLYNLVKIIAVTVKELCSSRSRRLNLPIVTDGVDDSEASEILLVKKKRDEVFLKDRIPLEFAIAGYVGLAAISTATIPIIFPPLKWYFVLCSYFIAPALAFCNSYGTGLTDWSLASTYGKIGLFIIASVVGSDGGVIAGLAACGVMMSIVSTAADLMQDFKTGYLTLSSAKSMFVSQLVGTAMGCVIAPLTFWLFWTAFDIGDPNGPYKAPYAVIFREMAILGIEGFAELPKHCLALCYGFFIAALIVNLLRDITPPKISQFIPIPMAMAVPFYIGAYFAIDMFVGTVILFVWERINRKDAEDFAGAVASGLICGDGIWTIPSAILSILRINPPICMYFGPSSAR

SEQ ID NO: 165 - DNA, 2625 bp, Arabidopsis thaliana
gaagaagactagaagatagctttgtcagattcacatctccccaaaaaaaaaacagagcaagaagaagaagaagaagacaaccatggaagaatcagaacaagttcttcctctattaacaaacccaaaagatctgacaaacccatcatatgcgtcatcatcttcatcttcatctgaaccaagagatgaaacagaggatcttcttttaccaatctccgacgagaatgaggaggaagaagaagagaactcaccaatccgacaagtagcactcactgttccgacaacagatgatccttcattacctgtcttaacatttcgcatgtgggtcttaggaactctctcttgcatcctcttgtcgtttctcaatcagttcttctggtatagaacagaacctctcactatctctgccatctccgctcaaatcgccgtcgtaccacttggtcgtctcatggctgctaaaatcaccgatagagtcttcttccaaggatcaaagtggcagtttacgttgaatccaggtccgtttaatgtgaaagagcatgtgttgatcactattttcgctaacgcgggagctggatctgtttacgcaatacacgttgttaccgtggtcaaagcgttttacatgaagaacataacgttctttgtgtctttcatcgttatcgttaccacccaagtgttaggttttggatgggctggaatatttaggaaataccttgttgaaccggcggcgatgtggtggccggcgaatcttgttcaagtctcactatttagagctttgcacgagaaagaagaacggaccaaaggagggctgacacgtacacaattcttcgtgatagcattcgtttgcagtttcgcttattatgtctttccgggctacttatttcagatcatgacgtcgttgtcgtgggtttgttggttctttccatcatcagttatggcccaacagatcgggtctggtcttcacgggttaggtgttggggccataggacttgactggtcaaccatttcctcttacttgggtagtccactcgctagtccatggtttgctacggctaatgtgggtgtgggatttgtgctggtgatatatgtcttggtaccaatatgctattggctcgatgtgtacaaggccaagaccttccccatattttcgagctcacttttttcgagccagggttcaaagtacaacatcacatccattatagactctaatttccaccttgacctcccagcctacgagcgtcaaggccctttgtatctttgcactttcttcgccattagttacggtgttggttttgccgctttaagcgctaccatcatgcatgttgctctcttccacggaagggagatatgggagcagagtaaggagagttttaaagaaaagaaattggatgtacacgcgaggctaatgcaaaggtacaaacaagttccagagtggtggttttggtgcatactcgttaccaacgttggagccacaatctttgcttgtgagtattacaatgaccaacttcaattaccatggtggggtgttctattggcatgtaccgtcgccattatctttacacttcctatcggtatcatcaccgccatcaccaatcaggcgccaggattgaacattattacagaatatatcataggatatatctatccaggatatccagttgcaaatatgtgctttaaagtatatggatacataagcatgcaacaagccatcacgtttcttcaagactttaagcttggtcactacatgaagataccacctagaaccatgttcatggcacagattgttggaacactcatctcatgttttgtttacctcacaacggcttggtggctaatggagaccatccccaacatatgtgattcggttactaactcggtttggacatgtccatcggataaagtcttttatgatgcatcggtgatatggggacttattggacctcgtagaatctttggagatcttggtttatacaaatccgttaattggttcttccttgtgggcgctatagcccctattcttgtatggttagcttcaaggatgtttcctagacaagagtggatcaagcttataaacatgccggttcttataagcgcgacaagctcgatgccgcccgcaacagccgtgaactacacaacatgggttcttgctggattcttatccggatttgttgtgtttaggtacaggccaaatctatggcagaggtataattatgttttgtcaggagcattggatgctggattagcatttatgggtgtgttgctttatatgtgtttgggacttgagaatgtgagtttggattggtggggaaatgagcttgatggttgtcctttggcctcttgtccaaccgcgcctggtattattgttgaaggatgcccgctttatacgtaaaacgcgtttgcgcggcgaaggcatttccaatgctaaagtttggtggttggatttggtacctatgtttgtaaagatcattttttacattcattctcatattcagtgtgtgagattgctgtgtatagtaaggatgattcattagtagggtggggtatttattcaattattcggattgattatttcagtttcttttaagtcggtcttgagtttttgaaaattcataatcaattgaaacgtttttt

SEQ ID NO: 166 - protein, 766 aa, Arabidopsis thaliana
MEESEQVLPLLTNPKDLTNPSYASSSSSSSEPRDETEDLLLPISDENEEEEEENSPIRQVALTVPTTDDPSLPVLTFRMWVLGTLSCILLSFLNQFFWYRTEPLTISAISAQIAVVPLGRLMAAKITDRVFFQGSKWQFTLNPGPFNVKEHVLITIFANAGAGSVYAIHVVTVVKAFYMKNITFFVSFIVIVTTQVLGFGWAGIFRKYLVEPAAMWWPANLVQVSLFRALHEKEERTKGGLTRTQFFVIAFVCSFAYYVFPGYLFQIMTSLSWVCWFFPSSVMAQQIGSGLHGLGVGAIGLDWSTISSYLGSPLASPWFATANVGVGFVLVIYVLVPICYWLDVYKAKTFPIFSSSLFSSQGSKYNITSIIDSNFHLDLPAYERQGPLYLCTFFAISYGVGFAALSATIMHVALFHGREIWEQSKESFKEKKLDVHARLMQRYKQVPEWWFWCILVTNVGATIFACEYYNDQLQLPWWGVLLACTVAIIFTLPIGIITAITNQAPGLNIITEYIIGYIYPGYPVANMCFKVYGYISMQQAITFLQDFKLGHYMKIPPRTMFMAQIVGTLISCFVYLTTAWWLMETIPNICDSVTNSVWTCPSDKVFYDASVIWGLIGPRRIFGDLGLYKSVNWFFLVGAIAPILVWLASRMFPRQEWIKLINMPVLISATSSMPPATAVNYTTWVLAGFLSGFVVFRYRPNLWQRYNYVLSGALDAGLAFMGVLLYMCLGLENVSLDWWGNELDGCPLASCPTAPGIIVEGCPLYT

SEQ ID NO: 167 - DNA, 2361 bp, Arabidopsis thaliana
acttcagaagaagaaagaaaatggacgcggagaaggctactgataagactaatgtccatctctcctcggaccatgagcgttgtccggtggaggaagtggctcttgttgtgcctgagacggatgatccaagcctaccggtgatgacattcagagcttggttcttgggtctgacctcttgtgttctgctcatctttctcaacacgttcttcacataccgtacgcagccactcaccatctcagccatcctcatgcagatcgctgttttgcccatcggcaagttcatggctcggactcttcccaccacttctcacaaccttcttgggtggagttttagcctcaatcctggtccttttaacatcaaggagcatgtcattatcaccatctttgctaattgtggcgttgcttacggtggtggtgatgcttactctattggggctatcactgttatgaaagcttactataaacagagccttagcttcatctgtggtctcttcatcgtcttgaccactcagattttgggttatggttgggctgggattctgaggaggtaccttgttgatcctgttgacatgtggtggccttcaaatctcgctcaagtttctctcttcagagcgttgcacgagaaggaaaacaagtctaaaggcttgacgaggatgaagttctttctagtagctcttggtgctagctttatttactatgcacttccaggctatctattcccaatcttgactttcttctcatgggtttgttgggcttggccaaacagcatcacggctcagcaggttggttcagggtaccatggccttggggttggagccttcactcttgactgggctggcatctctgcttaccatggtagtccattggtggctccatggtcctctatcctcaacgttggtgttggtttcatcatgtttatatacatcatcgtccctgtttgttactggaagttcaacactttcgatgccagaaagttccccattttctccaaccagctattcactactagtggccagaagtatgacacaaccaagatcttgacaccgcagtttgatctggatattggtgcttataacaactacgggaaactttacctcagccctcttttcgcactctctatcggatccgggtttgcgagattcactgcaacactaactcatgtggcattgttcaacggcagggacatatggaagcagacttggtctgcagtgaacaccacgaagctggacatccatggaaaattgatgcaaagctacaaaaaagtgcctgagtggtggttttatatattgctggcaggaagtgtagccatgtctctcctaatgtcttttgtgtggaaggagtcagtgcagcttccatggtggggaatgctctttgcttttgcattggccttcattgtcacactccctatcggtgtcattcaagcaactacaaatcagcaaccaggatatgatataatagggcagttcattatcggttatatcctgcctggaaaacccattgcaaacctgattttcaagatttacgggagaatcagcacagtccatgctctctcatttttggcagaccttaagcttggccattacatgaaaatcccaccgcgctgcatgtacacggctcagctggtgggcactgtggtagctggtgtggtgaatctgggagtggcctggtggatgttggagagcattcaagacatatgcgacatcgaaggagaccaccctaatagcccctggacttgccccaagtatagagtgacgttcgatgcttcagttatttgggggttgataggaccaagacggctctttggaccaggaggcatgtaccgtaaccttgtctggctcttcctcattggagctgtcctgcctgttcccgtgtgggcgctgagcaagatcttcccaaacaagaagtggatccctctcatcaacattccagttatctcctacggctttgcagggatgcctccagccactccaaccaacattgccagctggttggtcacaggaaccatcttcaactactttgtgttcaattaccacaagagatggtggcagaagtacaattacgtactctctgcagcgctcgatgcagggaccgcgttcatgggggtgctcttgttcttcgccctgcagaatgctggacacgacctcaaatggtggggcactgaagtagaccactgccctcttgcctcctgtcccacggctcctggaatcaaagccaaaggctgtcccgttttctaagctcagcagaattgattagattcaaacataaaaattcacatgttttgccctttctattgcttctttctgtacagccttctactgttagatagtggccatcagaatgcaataaactctaccttagatt

SEQ ID NO: 168 - protein, 737 aa, Arabidopsis thaliana
MDAEKATDKTNVHLSSDHERCPVEEVALVVPETDDPSLPVMTFRAWFLGLTSCVLLIFLNTFFTYRTQPLTISAILMQIAVLPIGKFMARTLPTTSHNLLGWSFSLNPGPFNIKEHVIITIFANCGVAYGGGDAYSIGAITVMKAYYKQSLSFICGLFIVLTTQILGYGWAGILRRYLVDPVDMWWPSNLAQVSLFRALHEKENKSKGLTRMKFFLVALGASFIYYALPGYLFPILTFFSWVCWAWPNSITAQQVGSGYHGLGVGAFTLDWAGISAYHGSPLVAPWSSILNVGVGFIMFIYIIVPVCYWKFNTFDARKFPIFSNQLFTTSGQKYDTTKILTPQFDLDIGAYNNYGKLYLSPLFALSIGSGFARFTATLTHVALFNGRDIWKQTWSAVNTTKLDIHGKLMQSYKKVPEWWFYILLAGSVAMSLLMSFVWKESVQLPWWGMLFAFALAFIVTLPIGVIQATTNQQPGYDIIGQFIIGYILPGKPIANLIFKIYGRISTVHALSFLADLKLGHYMKIPPRCMYTAQLVGTVVAGVVNLGVAWWMLESIQDICDIEGDHPNSPWTCPKYRVTFDASVIWGLIGPRRLFGPGGMYRNLVWLFLIGAVLPVPVWALSKIFPNKKWIPLINIPVISYGFAGMPPATPTNIASWLVTGTIFNYFVFNYHKRWWQKYNYVLSAALDAGTAFMGVLLFFALQNAGHDLKWWGTEVDHCPLASCPTAPGIKAKGCPVF

SEQ ID NO: 169 - DNA, 2430 bp, Arabidopsis thaliana
ctattttttgtacacttagactaaggaaagcaaagtttcatattcctaaaaattctggttttataagtatcaaagacaaattcagtctccatggaaatagagcaaagaaggatcatgaagagagaaggagaagaagaagaagacaacaatcaactttcactgcaagaagaagaaccagatacagaggaagagatgtctgggaggacaatcgaaccgtggacgaagcagataacggtgagaggagtgttcgtgagcatagtgatcggagttgtgttcagtgtgattgctcagaagctaaatctcacgacaggaattgttccaaatctcaacagctctgcagctttacttgcttttgtctttgtccagacttggactaagattctcaagaaatcaggatttgttgcgaaaccattcacaagacaagagaacacaatgattcagacatctgctgttgcttgttacggcatcgctgtcggaggtgggtttgcttcatatcttctggggttaaaccataagacatatgtgttgtctggtgtgaacttggaaggtaactctccaaagagtgtgaaagaacctggccttggttggatgactgcttatctctttgttgtctgtttcatcggtctttttgtcctaatccctctccgaaaggttatgattgttgaccttaaattaacatatccgagtggtttagctactgcggttctcatcaatggcttccacacacaaggagatgcacaggccaagaaacaagtgcgtggtttcatgaaatacttctcatttagtttcttgtggggtttcttccagtggtttttctctggtattgaagattgtggctttgctcaattcccaacctttggtttgaaagcttggaaacaaacgttcttctttgatttcagcatgacatttgtgggagcaggaatgatttgttcacatttggttaacctttctttgcttttaggagctatcctctcttatggcttaatgtggcctcttcttgataaacttaagggctcttggttccctgataatctcgacgaacacaacatgaagagcatttacggctacaaagtcttcttatccgtagctctaatcctcggcgacggtctttacactttcgttaagatcctctttgtgaccattgccaatgtcaacgcaagattgaagaacaaacctaatgatctagatgacgtaggtcacaagaaacaacggaaagatctcaaggaagatgagaatttcctcagagataaaatcccaatgtggttcgcagtttccggatatcttacattcgctgcggtctcaaccgtcgtggttcctctgatatttcctcagctcaaatggtattacgttattgtagcttacattttcgcgccttctctggccttctgtaacgcttatggagctggacttacagacattaacatggcttataactacggcaaaattggtctttttgtcatcgcggctgtgacgggaagagagaacggagttgtagccggactcgccggttgtggactgatcaaatccgttgtttcggtttcttgtattttgatgcaagatttcaagacggctcattacacgatgacgtcacctaaggctatgtttgctagccaaatgattggaacggtcgttggatgcatcgtgacgccgttaagtttctttttgttctacaaagcgttcgacattggaaaccctaacggagaattcaaggctccttacgctttgatttacagaaatatggcgattcttggggtgcaaggcttctctgctctgcctcttcactgtctccaaatgtgttacgggtttttcgggtttgctgttttggtcaacgtcgtcagagatcttactccggcgaagattggaagattcatgccacttccgacggcgatggctgttccgtttcttgtcggagcttatttcgcaatcgacatgtgtgttgggactttgattgtgtttgtttgggagaagatgaatcggaagaaagcagagtttatggttccggcggtggcttcagggctaatctgtggcgaagggctttggactttacctgcggcggtgcttgccctcgccggagtaaaacctccgatatgtatgaagttcttagcttcataggatcagtcaaagagataagaagacttgtgaagttagagtacttagaagacgtcaatgatattaaaatcatcctattcttagaataacaggtagacttctgaacaagaacatctcttcttctaggaattaagactaaaatctacttacatccggatgattcatgctctgttttttggtttggtataatttgtcaacacatctagatctgttccatttccggttatcttctattgggttatctctgaaactgttatgggctcggcccataaatttaaaccttggtgtaacaaaaagtaataaaatcagctatttaatcct

SEQ ID NO: 170 - protein, 673 aa, Arabidopsis thaliana
MEIEQRRIMKREGEEEEDNNQLSLQEEEPDTEEEMSGRTIEPWTKQITVRGVFVSIVIGVVFSVIAQKLNLTTGIVPNLNSSAALLAFVFVQTWTKILKKSGFVAKPFTRQENTMIQTSAVACYGIAVGGGFASYLLGLNHKTYVLSGVNLEGNSPKSVKEPGLGWMTAYLFVVCFIGLFVLIPLRKVMIVDLKLTYPSGLATAVLINGFHTQGDAQAKKQVRGFMKYFSFSFLWGFFQWFFSGIEDCGFAQFPTFGLKAWKQTFFFDFSMTFVGAGMICSHLVNLSLLLGAILSYGLMWPLLDKLKGSWFPDNLDEHNMKSIYGYKVFLSVALILGDGLYTFVKILFVTIANVNARLKNKPNDLDDVGHKKQRKDLKEDENFLRDKIPMWFAVSGYLTFAAVSTVVVPLIFPQLKWYYVIVAYIFAPSLAFCNAYGAGLTDINMAYNYGKIGLFVIAAVTGRENGVVAGLAGCGLIKSVVSVSCILMQDFKTAHYTMTSPKAMFASQMIGTVVGCIVTPLSFFLFYKAFDIGNPNGEFKAPYALIYRNMAILGVQGFSALPLHCLQMCYGFFGFAVLVNVVRDLTPAKIGRFMPLPTAMAVPFLVGAYFAIDMCVGTLIVFVWEKMNRKKAEFMVPAVASGLICGEGLWTLPAAVLALAGVKPPICMKFLAS

SEQ ID NO: 171 - DNA, 2628 bp, Arabidopsis thaliana
aatactagtacatcctctcaaacatcttaactaaaacagaggtctaactttttcctttttcctggaaaaattgcagagaaaatttatttttaatgtcaggtcattaacacaggttgcttacaagaacattacttctacagcaagttattcagaactctggacattatcacccgagtcgatcgacgtcagggccgcctaacagaaaatggtaggctctctcgaagtatccaagcctccagagcacaaggttgagtccaagatcgtcatagccgatgaagaagaagaggatgaaaacgacagtccaatcgaagaggtccgtttaaccgtaccgataaccgacgatccatctctaccagttttgacattccgtacatggttcttaggaatggtttcttgcgtggtactcgcgttcgtgaacaatttcttcggttaccggtcgaacccgctcacggtatcttcagtcgtggctcagatcatcactctccctctaggaaagctcatggccacgactctaccaacaacaaaactccgtttacctggtacaaattggtcgtgttcgttgaaccctggaccattcaacatgaaggaacatgtactgatcactatattcgctaataccggagctggaggagcttatgccaccagcatcctaaccatcgttaaagcattttatcaccggaatctcaatcccgccgccgccatgttgcttgtccaaaccactcagttgttgggatatggatgggcgggtatgttcaggaaatacctagtggactcaccttacatgtggtggcctgcaaatcttgttcaagtctctctctttagagccttacatgagaaggaggagaagcgtgaaggaaaacaaacgaaacttagattcttcttgatagtcttcttcctgagcttcacttactacatagtcccaggctatcttttcccttccatctcatatctctcctttgtctgctggatatggacccgctctgtaaccgctcaacagatcggttcagggctgcacggtctcggcattggctcatttggtcttgattggtccacggttgcaggtttcttaggcagtcctttagctgtaccgttcttcgctatagccaattcctttggcggatttatcatcttcttctacatcatccttcctatcttctactggagcaacgcttacgaggcaaagaagtttcctttctatacctctcacccatttgatcacactggtcagcgttacaacaccactcgtatcctcaaccagaaaacattcaatattgatcttcctgcttacgaaagctatagcaagctttaccttagcattctgtttgctctgatctatgggctcagcttcggtacccttaccgcaaccatttctcatgtcgccctctttgacggaaagtttatctgggagctgtggaagaaggcaacattgacgacaaaggacaagtttggagatgtgcatacaagattgatgaagaagaattataaggaagtacctcaatggtggttcgttgcggttctcgctgcttcctttgtgctagctctttatgcatgtgagggatttggcaaacagcttcagctcccatggtggggacttttactcgcttgtgccatcgcctttaccttcactttgcctattggagttatcctagcgaccacaaaccagcgaatgggtcttaatgttatatcggaactgatcatcgggttcttgtatccgggaaagccacttgccaatgtggcttttaagacttatggttctgtgagtatagctcaagccttgtactttgtcggagacttcaaacttggccactacatgaagattcctccgagatctatgttcatcgttcaactcgttgcgactattgttgcttcaactgtctccttcgggaccacatggtggttgctttcttcagtcgagaacatctgtaacacagatatgctcccaaagagtagtccgtggacttgccctggggatgtagtgttctacaacgcgtcgatcatttggggaatcatcggtcctggaaggatgttcacaagtaaaggtatataccccgggatgaactggttcttcctcattggcttccttgctcctgtcccggtctggttctttgcaaggaaattcccggagaagaagtggatacatcagattcatattcccttgatcttctcaggggctaatgtgatgccaatggccaaggctgtgcattactggtcgtggttcgctgttgggatcgtgttcaactactatatcttcaggaggtacaagggatggtgggcaaggcataactacatcctctctgcagctcttgatgcaggcactgcggttatgggagtgttgatctactttgcgttacagaacaataacataagcttaccagattggtgggggaatgagaacacagaccattgccctttggcaaattgcccaacagagaaagggatcgtcgctaagggctgcccggtgttctaaaaccttgttgcagtttaacattatctctgtagtttctcatacctgcaggtgagggacagttactgcaaagtcgtttggtggccataataataataatgcgtaaagactttgtgagagtttaagtgataaagtaaaaaatggtttgcaaattaagaacaccc

SEQ ID NO: 172 - protein, 753 aa, Arabidopsis thaliana
MVGSLEVSKPPEHKVESKIVIADEEEEDENDSPIEEVRLTVPITDDPSLPVLTFRTWFLGMVSCVVLAFVNNFFGYRSNPLTVSSVVAQIITLPLGKLMATTLPTTKLRLPGTNWSCSLNPGPFNMKEHVLITIFANTGAGGAYATSILTIVKAFYHRNLNPAAAMLLVQTTQLLGYGWAGMFRKYLVDSPYMWWPANLVQVSLFRALHEKEEKREGKQTKLRFFLIVFFLSFTYYIVPGYLFPSISYLSFVCWIWTRSVTAQQIGSGLHGLGIGSFGLDWSTVAGFLGSPLAVPFFAIANSFGGFIIFFYIILPIFYWSNAYEAKKFPFYTSHPFDHTGQRYNTTRILNQKTFNIDLPAYESYSKLYLSILFALIYGLSFGTLTATISHVALFDGKFIWELWKKATLTTKDKFGDVHTRLMKKNYKEVPQWWFVAVLAASFVLALYACEGFGKQLQLPWWGLLLACAIAFTFTLPIGVILATTNQRMGLNVISELIIGFLYPGKPLANVAFKTYGSVSIAQALYFVGDFKLGHYMKIPPRSMFIVQLVATIVASTVSFGTTWWLLSSVENICNTDMLPKSSPWTCPGDVVFYNASIIWGIIGPGRMFTSKGIYPGMNWFFLIGFLAPVPVWFFARKFPEKKWIHQIHIPLIFSGANVMPMAKAVHYWSWFAVGIVFNYYIFRRYKGWWARHNYILSAALDAGTAVMGVLIYFALQNNNISLPDWWGNENTDHCPLANCPTEKGIVAKGCPVF

SEQ ID NO: 173 - DNA, 2536 bp, Arabidopsis thaliana
aatggatataaacatcaaaattcaataattgcgatagagtatcaatcaagatcttacatataaaaaaagattcatcccccaaagaacggaacactcactcttctaaaacgatgggagagatagcaacagagttcacgccggttatggatgatgatgatgaccggtgcgttgtaccggaggtagagctcactgtacccaagaccgacgattcaactttaccggttttaacatttcggatgtgggttcttggtataggcgcgtgcattgtactctcctttatcaaccagtttttctggtacagaacgatgccgttgagtatcaccggaatctccgctcagatcgccgtcgtgccgcttggtcatctcatggcgagagtgcttccgacaaaaagattcttggaaggtacgaggtttcagtttaccttaaacccgggtgccttcaacgtcaaggaacatgttctgataactatctttgcaaattccggcgccggctctgtttacgctactcacatacttagtgctattaagctttactacaaacgttctcttcctttcctccctgcatttctcgtcatgatcaccactcagattcttggatttggttgggctggtctcttcaggaaacaccttgttgagcctggtgaaatgtggtggccaagcaatcttgttcaagtctctctctttggtgcgttacacgagaaagaaaagaaatcaagaggaggcatgagtagaactcaattcttcttaatcgtcctcgtagctagctttgcttactacatctttcctggttatcttttcaccatgttaacatcaatctcatgggtctgttggctcaatcccaaatcaattctggtaaaccaactcggttcaggtgaacatggtcttggcattggttccattggttttgattgggtcactattagtgcttatcttggaagccctttagctagtcctttgttcgcttccgtcaatgtagccattggtttcgtgctggttatgtatatcgtcacgcctgtttgttactggcttaacatttatgatgccaagaccttccctatcttctctagtcagctcttcatggggaatggctcacgttatgatgttttgagcattattgatagcaaattccatcttgaccgtgtggtttactctaggaccgggtccatcaatatgagcaccttctttgctgttacttatggtctcgggtttgctacattgtctgccaccattgtccatgttttagtcttcaacggaagtgacttgtggaagcagacaagaggggcgtttcagaagaataagaaaatggatatacacacgagaatcatgaagaaaaactacagggaagttccattgtggtggtttttggtaatccttttactgaatatcgcgcttatcatgttcatctccgtgcactacaacgctactgtgcagcttccttggtggggagtgttacttgcttgtgccattgccatcagtttcactcctttgatcggtgtcatagctgccaccactaatcaggcaccgggattgaatatcataacagagtatgttatcgggtatatctacccggaacgtcctgttgcaaacatgtgtttcaaggtctatggatacattagtatgactcaagcgctaactttcatttccgacttcaagcttggtcattacatgaagatcccgcctagatccatgttcatggctcaggtggctgggacacttgtggcggtggttgtgtacacaggaacagcctggtggttaatggaagagattcctcatctttgtgatacatccttgcttccttcagacagccaatggacttgtcccatggaccgcgttttctttgacgcctctgtgatttggggactagtgggaccacgcagggtgtttggagaccttggagaatactcaaatgtcaactggttcttcctcgttggagccatagctccactcttagtttggctagccacaaagatgtttccggctcagacatggatcgccaagattcatatccctgtccttgtgggagccaccgcaatgatgccaccagcaacagcagttaacttcactagttggctcatcgtcgcattcatctttggccacttcatcttcaagtacagaagagtgtggtggaccaagtataactatgtgttgtctggtggtttagatgctggctctgcttttatgaccatacttctgtttctagcactcggacgaaaaggaattgaagtgcagtggtggggaaattccggcgaccgagatacatgtcccttagcttcttgtccaactgctaaaggtgttgtcgtcaaaggctgtcccgtcttctagctcatgagtcatgagacaaaagcatataccaagtgctttgtacagaacacacagcaaactgataattgtaattctcggaaatgtctttactctccaagaactatatcttttgtgatagctttaaaactaggtactatcctgttctttgactgaacacaaatgctagtgattctatatgtggttccttaaaatgattttaatgcatgcttcagaaa

SEQ ID NO: 174 - protein, 736 aa, Arabidopsis thaliana
MGEIATEFTPVMDDDDDRCVVPEVELTVPKTDDSTLPVLTFRMWVLGIGACIVLSFINQFFWYRTMPLSITGISAQIAVVPLGHLMARVLPTKRFLEGTRFQFTLNPGAFNVKEHVLITIFANSGAGSVYATHILSAIKLYYKRSLPFLPAFLVMITTQILGFGWAGLFRKHLVEPGEMWWPSNLVQVSLFGALHEKEKKSRGGMSRTQFFLIVLVASFAYYIFPGYLFTMLTSISWVCWLNPKSILVNQLGSGEHGLGIGSIGFDWVTISAYLGSPLASPLFASVNVAIGFVLVMYIVTPVCYWLNIYDAKTFPIFSSQLFMGNGSRYDVLSIIDSKFHLDRVVYSRTGSINMSTFFAVTYGLGFATLSATIVHVLVFNGSDLWKQTRGAFQKNKKMDIHTRIMKKNYREVPLWWFLVILLLNIALIMFISVHYNATVQLPWWGVLLACAIAISFTPLIGVIAATTNQAPGLNIITEYVIGYIYPERPVANMCFKVYGYISMTQALTFISDFKLGHYMKIPPRSMFMAQVAGTLVAVVVYTGTAWWLMEEIPHLCDTSLLPSDSQWTCPMDRVFFDASVIWGLVGPRRVFGDLGEYSNVNWFFLVGAIAPLLVWLATKMFPAQTWIAKIHIPVLVGATAMMPPATAVNFTSWLIVAFIFGHFIFKYRRVWWTKYNYVLSGGLDAGSAFMTILLFLALGRKGIEVQWWGNSGDRDTCPLASCPTAKGVVVKGCPVF

SEQ ID NO: 175 - DNA, 2378 bp, Arabidopsis thaliana
aatatgcgattctctcttcttcttcttcttcttccatcttacgccaaacctcgagtctgcgaatcattcgattctcagattcgcatattttcttcgaattcgctaggctcaaaacgttgtttccgtgtacaagaagcaacctaacgatttggggccaggtgaaggaagagctgatttaggttattgagattcgttttcttcaaatggaaaacgaaagggttgagagagaacagagccaatttcaggaagacgagtttatcgattcgagaaaaccaccgccatggaggaaacagatcacggttcgagcgatcgtcgcgagtttattgatagggattgtctacagtgtgatctgtctgaagctgaatctaacgacaggactcgtaccgaatctcaacatctcatcagctctcttggcttttgttttcctcaaatcatggaccaaagttcttcaaaaagccggaatcgccacgacgcctttcacacgtcaagagaacactattgctcaaacttgtgctgttgcttgttacagcatctctcttgcaggtggatttgcatcgtatttgttgggtttgaatagacgaacttacgaggagacaggagtgaacaccgaaggaaacaatcctcgtggtataaaagagcccggtgttggatggatgacatcattcctcttcgttactagcttcattggacttgttgtattggtacctcttcgaaaggtgatgattatagactacaagctaacttatcctagtggaacggcaacagctgttcttataaatggatttcatactagcaaaggagataagacagccaagaaacagattcgcgggtttataaaatcgtttggtttgagtttcttttgggcattctttggatggttctattcaggtggtgaaaaatgcggattctctcagttccctacatttgggttacaagctttggacaaaacattctactttgacttcagtatgacatatgttggagctgggatgatttgttctcatttggtgaatctgtcgttgctcttcggtgccatcctctcgtggggaatcatgtggcctctcatagcccggcttaaaggcgaatggttccctgcaacattgaaagataatagtatgcagggcttaaacggctacaaggtgtttatatgcattgcactgatcttaggagatgggctttataacttcgttaagatactctttttcactggaagaagcttccactctagactctccaaaaccaacagcatcagcacattggtagaagttccagaagatagcacgaaagaatccgataacctgaaacgagagaatgaagtgttcgttcgagagagcattccgctatggatggcttgtgtcggatacttattcttctcccttgtctccatcattgccatccctctgatgttccctcagctgaaatggtacttcgtcctcgtagcttacctcctcgccccgtctctcagcttctgtaacgcctatggagctggcttaacggatatgaacatggcttacaactatggtaaagcggcgctctttgtgatggcggcactggcaggaaaaaacgatggagtggtggctgggatggttgcttgtggtctcatcaaatcaattgtctctgtctcagctgacctgatgcatgatttcaagacgggacatcttacgcaaacctcgccccgctcaatgcttgttgcacaagccatagggacagcgataggctgcgtggttgcgccactcaccttcttcctcttctacaaggcgtttgatgttggaaaccaaaatggtgaatacaaagctccttatgctatgatatacagaaacatggctattatcggtgttcaaggtccctccgctctccccaagcattgcctagagctttgctacggattctttgcctttgcggttgctgccaacttggcaagagacctcttaccagataagccagggaagtggatcccactcccgatggcaatggctgtaccgttcctggtgggtgggtcgttcgcaatcgatatgtgtatcgggagcttagtggtatacgtttggaaaaaggtgaatcgtaagaaggcagatgtgatggttccagctgttgcatcaggtttgatatgtggagatggtctctggattctgccttcttctttgctggctctggctaaggttagacctcctatctgtatgaacttcactgcggctcattaaggcagaaagattttccagacaaaacccgaacttaccgccggagaaatgtatagtagatgtggttaggttaggagtagacagttaaagagggatgaaaccaaacttacatgtcttatgtaatatttatacttttggaataagaatgaacagaaagagagttggtttcttcttttaccggcg

SEQ ID NO: 176 - protein, 664 aa, Arabidopsis thaliana
MENERVEREQSQFQEDEFIDSRKPPPWRKQITVRAIVASLLIGIVYSVICLKLNLTTGLVPNLNISSALLAFVFLKSWTKVLQKAGIATTPFTRQENTIAQTCAVACYSISLAGGFASYLLGLNRRTYEETGVNTEGNNPRGIKEPGVGWMTSFLFVTSFIGLVVLVPLRKVMIIDYKLTYPSGTATAVLINGFHTSKGDKTAKKQIRGFIKSFGLSFFWAFFGWFYSGGEKCGFSQFPTFGLQALDKTFYFDFSMTYVGAGMICSHLVNLSLLFGAILSWGIMWPLIARLKGEWFPATLKDNSMQGLNGYKVFICIALILGDGLYNFVKILFFTGRSFHSRLSKTNSISTLVEVPEDSTKESDNLKRENEVFVRESIPLWMACVGYLFFSLVSIIAIPLMFPQLKWYFVLVAYLLAPSLSFCNAYGAGLTDMNMAYNYGKAALFVMAALAGKNDGVVAGMVACGLIKSIVSVSADLMHDFKTGHLTQTSPRSMLVAQAIGTAIGCVVAPLTFFLFYKAFDVGNQNGEYKAPYAMIYRNMAIIGVQGPSALPKHCLELCYGFFAFAVAANLARDLLPDKPGKWIPLPMAMAVPFLVGGSFAIDMCIGSLVVYVWKKVNRKKADVMVPAVASGLICGDGLWILPSSLLALAKVRPPICMNFTAAH

SEQ ID NO: 177 - DNA, 2276 bp, Arabidopsis thaliana
gttcttctctgagagtgagaggaatcactgaaaaaataatactgaccatttcccaaaaagttatgtacttattctgacgaaatctgcaggaaattctcaatttttttaaaagaagtagctttttggagttatggagacggagattcctaggtcaacggagatatcagagacattgttgttaccagaaacgaatctagatcacggtgaatatgtacccgagtggaaggaacagatcacgattcgaggcttgatctctagcgccttgttagggattttgttctgtatcattacccataagctcaatctaacaatcggaatcattccttcgcttaatgtagctgctggtcttctcggcttcttcttcatcaagtcgtggactgggttcttgtctaaattagggtttttatctaaaccctttactaagcaagagaacactgttattcagacttgcgttgtctcctgctacggccttgcttatagcggaggatttggttcgtatttgatagctatggatgaaaggacatataagctcattggttctgattatcctggaaacaatcctgaagatgttataaatcctggattgtggtggatgactggctttttatttgtagttagcttcctcggtctcttctgtctcgttccacttcgcaaggtgatgattttggattacaagcttacgtatcccagtggaaccgctacagcaatgttgattaacagtttccacaacaatactggagctgagcttgcaggaaaacaagtcaaatgtcttgggaaatacctgagccttagcttagtttggagttgcttcaagtggttctttagtggtattggaggtgcatgtgggtttgatcactttcccacacttggtttgactctattcaagaacacgttttactttgatttcagtcctacttttattggatgtggcatgatatgtccccatttggtgaactgttcggttcttcttggtgctatcatctcttggggttttctctggccatttatatcacagcatgctggggactggtatccagctgaccttaaagccaacgatttcaaaggtctctatggatataaggtatttatcgccatttctatcatccttggtgacggtctctacaacctcattaagatcattgttgtcactgtgaaggaaatctgcaacaaaagctccagacaacacaacctacctgtctttaccgacattttagataaaagtaagacctcagtattaatgcgggagaagaagaaaagagatatcatatttctcaaggaccgtatacccctcgagtttgcggtttctggttatgtgggtcttgcagctatttcaaccgctataatcccgttgatattcccaccattgaaatggtactttgtcctctgttcatacttagttgccccgggtcttgctttttgcaattcttatggagccgggctcacagatatgagcatgccttcaacctacggaaagactggtcttttcatcgttgcttcaattgtaggaaataatggtggagtcattgccggtttagcagcatgtggcattatgatgtcaatcgtctcaactgcagcggatctcatgcaggattttaaaacaggttacctcacactatcatctgcaaaatccatgtttgtaactcagcttttgggtacagcaatgggttgcataatcgctcctctcacgttctggctgttttggactgcttttgatattggagatcctgatggtctatacaaagcaccttacgcggtcatctaccgcgaaatggctattctcggggtcgaaggctttgccaaactgcccaaacactgtttggcactttgttgtggattcttcatcgctgctctgattgtaaatctaattagagacatgacaccaccaaagatctctaagttgataccacttccaatggcaatggctggtccattctacataggagcttacttcgccatcgacatgttcgtaggaaccgtgataatgctcgtatgggaacggatgaataagaaagacgcagatgattactcgggtgcagtagcttcaggtctgatctgcggagatggaatttggaccatcccatccgcaattctttctatattaagaatcaatccacccatttgtatgtactttagaccatcctagacattgttatcatgttaaaaatttgttgcattatggcagataatagagtttttatatctcactctagaacacaaagtgccaatagcaacaagtatgtggcataaagtcaaacagacaaggttgaccaacgaaa

SEQ ID NO: 178 - protein, 670 aa, Arabidopsis thaliana
METEIPRSTEISETLLLPETNLDHGEYVPEWKEQITIRGLISSALLGILFCIITHKLNLTIGIIPSLNVAAGLLGFFFIKSWTGFLSKLGFLSKPFTKQENTVIQTCVVSCYGLAYSGGFGSYLIAMDERTYKLIGSDYPGNNPEDVINPGLWWMTGFLFVVSFLGLFCLVPLRKVMILDYKLTYPSGTATAMLINSFHNNTGAELAGKQVKCLGKYLSLSLVWSCFKWFFSGIGGACGFDHFPTLGLTLFKNTFYFDFSPTFIGCGMICPHLVNCSVLLGAIISWGFLWPFISQHAGDWYPADLKANDFKGLYGYKVFIAISIILGDGLYNLIKIIVVTVKEICNKSSRQHNLPVFTDILDKSKTSVLMREKKKRDIIFLKDRIPLEFAVSGYVGLAAISTAIIPLIFPPLKWYFVLCSYLVAPGLAFCNSYGAGLTDMSMPSTYGKTGLFIVASIVGNNGGVIAGLAACGIMMSIVSTAADLMQDFKTGYLTLSSAKSMFVTQLLGTAMGCIIAPLTFWLFWTAFDIGDPDGLYKAPYAVIYREMAILGVEGFAKLPKHCLALCCGFFIAALIVNLIRDMTPPKISKLIPLPMAMAGPFYIGAYFAIDMFVGTVIMLVWERMNKKDADDYSGAVASGLICGDGIWTIPSAILSILRINPPICMYFRPS

SEQ ID NO: 179 - DNA, 2226 bp, Arabidopsis thaliana
atggacgagattgtagaagactcgagcagagtcatggagatagaaggacagaatgatgatctggaccggtgcgtggtggaggaggttgagctaaccgttccaaaaaccgatgatccaacgttaccggttctcacatttcgaatgtggactttaggtcttggtgcgtgtatcatactctcgttcataaaccagtttttctggtacagacagatgccgttaaccattagcggaatctcggctcagattgcggtcgtgccacttggtcacctgatggctaaggttcttcctacaaggatgttcttggaaggatcaaagtgggagttttctatgaatccaggtccttttaatgtcaaggaacatgtattgatcacgatttttgctaattcgggagctggaacggtttatgcgactcatatacttagtgcaattaagctctattataagagatctcttccatttctaccggcttttctccttatgatcacaacgcagtttctcggatttgggtgggctggtctattccgtaaacatcttgttgagcctggtgaaatgtggtggccaagcaatctagttcaagtgtctctcttcagtgccttgcacgagaaggaaaagaagaaaaagggaggcatgacccgaatccaattcttcctcattgtccttgttaccagttttgcatactacattctccctggttatttattcacaatgataacttccatctcatggatctgttggcttggtcccaaatcggttttggttcaccaactcggttcaggtgaacaaggtcttggtattggcgcaattggtattgactgggctacaattagctcttacctcggtagcccactcgcgagtcccttattcgctacaatcaatgtaaccatcggttttgtggtgatcatgtatgtcgccactccaatttgctattggctaaatatttacaaagccaaaacatatcccatcttctcaagtgggcttttcatgggcaatggctcgtcctatgatgttttaagcatcattgataagaagtttcatctcgaccgagatatatatgcaaagactggtcctatcaatatgagcactttctttgcagtcacatatggtcttgggtttgctactttgtccgcaactattgtccatgttttactcttcaacggaagggatttatggaaacaaacaagaggtgcttttcagaggaacaagaaaatggatttccacacgagaatcatgaagaaaaactatagggaagttcctatgtggtggttttatgtgatcctcgtactcaacattgcgctcatcatgttcatatcattctactacaatgcaaccgtgcagctaccttggtggggagtgttgctagcttgtgccattgctgtcttcttcactccgcttatcggtgttatcgccgccaccactaatcaggaaccgggtttgaacgtcattacggaatatgtaatcgggtatctctatccagaacgtccggttgctaacatgtgctttaaagtatatggatacatcagcatgactcaggctctaacattcatccaagacttcaaactcggactctacatgaagattcctcctagaagcatgttcatggcacaggtggttgggacgcttgtgtctgtggtagtgtacacaggaactgcttggtggttaatggtagacattcctcatctatgtgacaaatctttgcttcctccagatagcgaatggacatgtcccatggaccgtgtcttctttgatgcttcagttatttggggacttgtaggaccacgtagaatgttcggtaacttaggagaatacgcagccataaactggttcttcctcgtaggtgcaatcgctcctttctttgtctggctagcgaccaaagcattcccagctcataaatggatctcgaagattcattttccggtcattttaggagcaacctcgatgatgccacccgcgatggcggttaacttcacgagttggtgcatcgttgcatttgtgtttggacactttttgtataagtacaagagacagtggtggaaaaagtataactacgttttgtcgggtggtttagacgcgggcactgcgtttatgacaatacttatattcctatcggttggacgcaaaggaattggattgttgtggtggggaaacgctgatgatagcacaaactgtagcctcgcgtcttgtcctaccgctaaaggcgttattatgcatggatgtccagttttatga

SEQ ID NO: 180 - protein, 741 aa, Arabidopsis thaliana
MDEIVEDSSRVMEIEGQNDDLDRCVVEEVELTVPKTDDPTLPVLTFRMWTLGLGACIILSFINQFFWYRQMPLTISGISAQIAVVPLGHLMAKVLPTRMFLEGSKWEFSMNPGPFNVKEHVLITIFANSGAGTVYATHILSAIKLYYKRSLPFLPAFLLMITTQFLGFGWAGLFRKHLVEPGEMWWPSNLVQVSLFSALHEKEKKKKGGMTRIQFFLIVLVTSFAYYILPGYLFTMITSISWICWLGPKSVLVHQLGSGEQGLGIGAIGIDWATISSYLGSPLASPLFATINVTIGFVVIMYVATPICYWLNIYKAKTYPIFSSGLFMGNGSSYDVLSIIDKKFHLDRDIYAKTGPINMSTFFAVTYGLGFATLSATIVHVLLFNGRDLWKQTRGAFQRNKKMDFHTRIMKKNYREVPMWWFYVILVLNIALIMFISFYYNATVQLPWWGVLLACAIAVFFTPLIGVIAATTNQEPGLNVITEYVIGYLYPERPVANMCFKVYGYISMTQALTFIQDFKLGLYMKIPPRSMFMAQVVGTLVSVVVYTGTAWWLMVDIPHLCDKSLLPPDSEWTCPMDRVFFDASVIWGLVGPRRMFGNLGEYAAINWFFLVGAIAPFFVWLATKAFPAHKWISKIHFPVILGATSMMPPAMAVNFTSWCIVAFVFGHFLYKYKRQWWKKYNYVLSGGLDAGTAFMTILIFLSVGRKGIGLLWWGNADDSTNCSLASCPTAKGVIMHGCPVL

SEQ ID NO: 181 - DNA, 2202 bp, Arabidopsis thaliana
atgaaagactttacagatacaatatcggagtcggagtgcgacgatgagataagtatagttccacaagtggaactaacggtgcccaaaaccgacgatccaacttcaccgacggttacgtttaggatgtgggttcttggcataaccgcttgtgttctcttgtcatttcttaaccagtttttctggtacagaaccaatcctttgaccatctcctctgtttcggctcagattgctgttgttcccattggtcatctcatggctaaagttcttcccacaaggagattcttcgaagggacgaggtggtctttcacgatgaatcctggtccctttagcaccaaggaacatgttcttataactgtgtttgcaaactcaggctctggggctgtttacgctactcatattcttagtgctgttaagctttattacaagagaaggcttgatttcttacccgctttgctcgttatgatcaccactcaggtattgggatttggttgggctggtttgtataggaaacatttagttgagccaggtgaaatgtggtggccaagcaatctcgttcaagtgtctctcttcagagcattgcatgagaaagagaacaaatcgaaatggggaattagtcgaaatcagttctttgtcatcactctcatcactagcttctcctattatctcctacctggttatctcttcacggtcttaaccaccgtctcttggttatgttggattagccctaaatcgattctagtaaaccagcttggttcagggtcagcaggtcttggtatcggttcctttggtctggactggtcaaccatcgcgtcataccttggaagtccactcgctagcccattctttgcctctgcaaatattgcggccgggttctttcttgtgatgtacgtaatcacacctctctgttactatcttgatttgtacaacgccaaaaccttcccaatctactccggtaaactctttgtagccagtgggaaagaatacaaagtaacgagcatcatcgatgccaatttccgcctggatcgtcaggcttacgcagagaccggaccagtccacatgagcactttctttgccgtgacctatggactaggtttcgcgaccttgtctgctagtattttccatgtcctgattttcaacggcaaagatctctggactcaaaccagaggagcgtttggaaaaaacaagaaaatggatatacatacaaagatcatgaagaggaattataaagaagttcctctctggtggttcctttcgattttcgcggtgaatcttgcagttattgtcttcatatgtatttactataagacacagattcagcttccatggtggggagctttcttggcttgtttgatagctatcttcttcactcctctcgttggtgtgatcatggccactactaaccaggctccgggtctgaacattatcacggagtacataattggatatgcatatccagagagaccagttgctaacatatgcttcaagacttacggatacatcagcatgtctcaatctttgactttcctctctgatttaaagcttggaacttacatgaagatcccaccaagaaccatgttcatggcacaggttgtgggcactttagttgcagttatcgcttacgcaggcacggcttggtggctaatggctgaaatcccaaatctctgcgacactaatctgcttccaccgggaagtcaatggacttgtccatcggatcgagtcttcttcgacgcatcagtgatttggggactagtaggaccaagaagaatgtttggtgatcttggagaatactcgaacataaactggttcttcgtaggaggtgcaatagctccagcattggtatacttagcctcaagactcttcccaaacaagaaatggatctcagacattcacatccctgttctgattggagccacagctataatgccaccagcttctgcggtgaacttcacgagctggctcgttatggcgtttgtgtttggacatttcgtgtttaagtacagaagagaatggtggcagcgatataactatgttctgtctggaggaatggatgcaggaactggattcatgtcagtgcttttgtttcttgcgttgcaacgtagtgagattgcgattgattggtggggaaattctggagaaggttgtcctgttgctaaatgtccaactgctaaaggtgttgttgttcatggttgtcctgttttctaa

SEQ ID NO: 182 - protein, 733 aa, Arabidopsis thaliana
MKDFTDTISESECDDEISIVPQVELTVPKTDDPTSPTVTFRMWVLGITACVLLSFLNQFFWYRTNPLTISSVSAQIAVVPIGHLMAKVLPTRRFFEGTRWSFTMNPGPFSTKEHVLITVFANSGSGAVYATHILSAVKLYYKRRLDFLPALLVMITTQVLGFGWAGLYRKHLVEPGEMWWPSNLVQVSLFRALHEKENKSKWGISRNQFFVITLITSFSYYLLPGYLFTVLTTVSWLCWISPKSILVNQLGSGSAGLGIGSFGLDWSTIASYLGSPLASPFFASANIAAGFFLVMYVITPLCYYLDLYNAKTFPIYSGKLFVASGKEYKVTSIIDANFRLDRQAYAETGPVHMSTFFAVTYGLGFATLSASIFHVLIFNGKDLWTQTRGAFGKNKKMDIHTKIMKRNYKEVPLWWFLSIFAVNLAVIVFICIYYKTQIQLPWWGAFLACLIAIFFTPLVGVIMATTNQAPGLNIITEYIIGYAYPERPVANICFKTYGYISMSQSLTFLSDLKLGTYMKIPPRTMFMAQVVGTLVAVIAYAGTAWWLMAEIPNLCDTNLLPPGSQWTCPSDRVFFDASVIWGLVGPRRMFGDLGEYSNINWFFVGGAIAPALVYLASRLFPNKKWISDIHIPVLIGATAIMPPASAVNFTSWLVMAFVFGHFVFKYRREWWQRYNYVLSGGMDAGTGFMSVLLFLALQRSEIAIDWWGNSGEGCPVAKCPTAKGVVVHGCPVF

SEQ ID NO: 183 - DNA, 2371 bp, Arabidopsis thaliana
gaatcattcagttacaagaaaatcgtcctcttctctcgccgatctcttctcttcagatcctctcctctataaaatctctccctctctcgttcccctcctcagatctgactcaaatcaaatcaaaaactctcagctatggaagtcgaacgatcgaagaaagacgacgatctaaacaatggatctaaatccaacgaagaagaagaaatctccgtggagagaatcttcgaagagagtaacgaaatcccaccgccgtggcaaaaacagctcacgttcagagctctaatcgtgagtttcatactcgcgattctctttacctttgtggtgatgaaactgaatctaacgactgggattattccgtcgctgaatatctccgccggtttgcttggtttcttctttgttaaaagttggactaagattcttaataaagctggttttcttaaacaaccgtttacacggcaagagaatactgtgattcagacttgtgtcgtcgcctcctccggcatcgcctttagcggtgggtttggtagttatctgtttggaatgagtgatgttgttgctaaacaatctgcggaagccaatactccgttgaacataaagaatccacatttgggttggatgataggatttctctttgtcgttagctttcttggtcttttctccgtcgttcctcttcgaaagatcatgatcgtggacttcaaattgacatatcctagtggtactgccactgcccatctcattaacagcttccacacacctcaaggtgccaaactcgcaaagaagcaagtcagagcattgggcaagttcttctcattcagtttcttatggggtttctttcaatggttctttgctactggtgacggttgtggtttcgccaacttccctacatttggtctcaaagcctatgaaaacaaattctactttgatttctctgctacatatgttggtgttggaatgatttgtccatatcttatcaatgtgtctcttctcatcggagcaattctctcatggggtgttatgtggcctctcattggtgcccaaaaaggcaaatggtatgctgctgatctctcatcaaccagtctccatggtcttcaaggctacagggtgtttatagccatagctatgatcctcggtgatggtctctacaacttcatcaaagtcttaggccgcactgtcttcggtctatacaagcaattcaagaacaaagatgttcttcctatcaacgaccatacatcaacagcccctgtaaccatttcctacgacgacaaaagaagaacagagcttttcctcaaagacagaatcccatcatggtttgctgtaaccggttacgtagtattggctatagtctcaatcatcacagttccacatatcttccatcagctaaaatggtaccacattttgatcatgtacataatcgcccctgtcttagccttttgcaacgcctacggttgcggactcactgactggtccttagcttccacttatggaaaactcgccattttcaccatcggagcctgggctggtgcatctaacggaggcgtcttagctggacttgcagcttgtggtgtcatgatgaacattgtctcaacagcttctgatcttatgcaagatttcaaaaccggttacatgacattagcctcaccaagatcaatgttcttgagccaagccattggaaccgccatgggatgtgtgatctctccttgcgtcttctggctattctacaaggcgttccctgactttggccaacccgggaccgcctatcccgctccatacgccttagtctacagaaacatgtctatactcggagtcgaaggattctctgctttgcccaaacattgcctcatgctctgctacatattcttcgcagcagcagtgatcgtaaacggtataagggatgcccttgggccaaagtgggctcggtttatcccgctcccaatggctatggctatacccttctaccttggaggttacttcacaatagatatgtgtctgggaagtctcatactgttcatctggaggaagctgaataaaccaaaggccgatgcgtactcttctgctgttgcttctggtttgatctgtggtgaaggtatttggacgttaccaagctctatccttgccttggctggtgtcaaggctcctatttgcatgaagttcttgtccatggcttccaacaacaaggttgatgccttcttaaacccttcttaacattcttttttttttttttagagtttggtttttaattttctacgtttctttgtctagttttaattggctttttaggtcctcatgtgtctgtctttaagttggtggtttcttttctttctactcaaatatgtaaaaaaagggaatgaatgaattatttggttttctggtt

SEQ ID NO: 184 - protein, 675 aa, Arabidopsis thaliana
MRSMMMEREGRNEIEREVIDDLEETQNEGDDFKSIPPWKEQITFRGIVASLIIGIIYSVIVMKLNLTTGLVPNLNVSAALLAFVFLRSWTKLLTKAGIVTKPFTKQENTVVQTCAVACYSIAVGGGFGSYLLGLNRITYEQSGGTHTDGNYPEGTKEPGIGWMTAFLFFTCFVGLLALVPLRKIMIIDYKLTYPSGTATAVLINGFHTPKGNKMAKKQVFGFVKYFSFSFIWAFFQWFFSGGTECGFIQFPTFGLEALKNTFYFDFSMTYVGAGMICPHIVNISLLFGAVLSWGIMWPLIKGLKGDWFPSTLPENSMKSLNGYKVFISISLILGDGLYQFIKILFKTGINMYVKLNNRNSGKSNSEKDKQSIADLKRDEIFVRDSIPLWVAAVGYAAFSVVSIIAIPIMFPELKWYFIVVAYMLAPSLGFSNAYGAGLTDMNMAYNYGKVALFILAAMAGKQNGVVAGLVGCGLIKSIVSISSDLMHDFKTGHLTLTSPRSMLVSQAIGTAIGCVVAPLTFFLFYKAFDVGNQEGEYKAPYALVYRNMAILGVEGFSALPQHCLQLCYGFFAFAVAANLVRDRLPDKIGNWVPLPMAMAVPFLVGGYFAIDMCVGSLIVFAWNMRDRVKAGLMVPAVASGLICGDGLWILPSSVLALAGVRPPICMGFMPSKYSS

SEQ ID NO: 185 - DNA, 2820 bp, Arabidopsis thaliana
caaaattcatgtggtgtaaattgtctaaagtctgtatttttttttattgacatccattttttttgtgtcgaaagtctatatatgaagtcaaattcatgaacaaatgcttctaggctaaaaacgttatcgtaatctttaatcttcaggcttcttttctaaaattccgactggttaccgagggctagaaaatccggtcaccgtcgccggagacaacctcggtttctaaacgaaaccatcgtgaaggacggaaaaaaggagcttgaagacaaaacaatgacgagcgttttcgacgaacataaaccctccgatgactctcacgagtccaagatcgtcatcaatggagaagaagaggtgttggaggaggagaatgataatccgattgaagaagtccggttaacggtaccgataaccgacgatccaacactaccggtgctaacgtttcgaacatggactcttggacttttctcttgcatattgcttgccttcgtgaaccagttctttggtttccggtcgaaccagctttgggtatcttcagttgcggcacagatcgtgacccttccgctagggaaactcatggcaaagacgctaccgacaaagaaatttgggtttcccgggacgaattggtcgtggtcttttaaccctggtccgttcaatatgaaggaacatgttcttattacaatatttgctaacaccggagctggtggagtttacgccaccagtattattaccattgttaaagcgttttataatcgtcaacttaatgtcgccgccgccatgttgctcactcaaaccactcagttgttgggatatggatgggctggaatcttcaggaagttccttgtggattcaccgtatatgtggtggccgtcaaatttggttcaagtctcactctttagagctttacatgagaaggaggatctacaaaaagggcaacaaacaaggtttagattcttcatcattgtcttctgtgtgagctttgcttactacataatccccggctaccttttcccttccatttccgcaatttcatttgtttgctggatttggaaaagctcagtgaccgctcagattgtcggttctgggctcaagggtttaggtattggttcgttcggtcttgactggtccacagttgctggtttcttaggcagtccgttggctgtaccattcttcgccattgccaatttctttggaggattcttcatctttttatacattgttctacctatcttctactggactaatgcttatgatgctcagaagtttccgttctatacttcacacacctttgatcagactggacacacctataacattacccgtatcctcaatgagaagaatttcgatatcaatctagacgcttacaacggttacagcaagctctatttgagtgtgatgttcgcgttgctctatggactcagctttggttctctttgcgctaccatctctcatgttgccctctatgatggaaagtttatatggggaatgtggaagaaggcaaagacagcaacaaaggacaagtacggtgacgtgcattcgagattgatgaagaagaattatcaatcagtacctcaatggtggttcatcgcagttctagttatttcctttgctttcgcactctatgcttgcgagggctttgacaaacagcttcagctcccatggtggggacttatactcgcttgcgccatcgctttgttcttcacattacctatcggagttatccaagcaactactaaccagcaaatgggtcttaacgttataacagaactgatcatcgggtacttatacccaggaaagccactagccaatgtcgctttcaagacatacggatacatcagtatgtctcaagccttgtactttgtaggagacttcaagcttggtcactacatgaagattcctccaagatcaatgttcatcgtccagcttgttgcaactgtggttgcatcaactgtctgcttcggaacaacctggtggctcattacatccgtcgagaacatatgtaatgtcgatttgctcccggtgggtagtccatggacttgtcctggagatgaagtgttctacaatgcatcaatcatatggggagtgattggtccagggagaatgtttaccaaagaaggtatctatcccgggatgaactggttcttccttatcggtctcctcgctccagttcccttctggtacctatcgaagaagttcccagagaagaaatggctaaaacagatccatgttcccttgatcttctctgcagtaagcgccatgccacaagctaaggctgtgcattactggtcctgggccatcgttggggttgtgttcaactactacatcttcaggaggttcaaaacttggtgggcgaggcacaattacatcctctctgcggcgcttgatgcaggtactgcgattatgggagtgttgatattcttcgcattccagaacaatgatataagcttacctgattggtgggggcttgagaattcagaccattgccctctagcgcattgccctctagccaaaggtgttgttgttgaaggttgtcccgtgttttaagaattgaagtagatgcaacgttgtcctgaaaggggtaactgttgatggcttcggtaaccttatatctgtgtaaaaccctccaagttaagggactcaaacaatgtaaagcactagatttggtttcatgttcttcagtatttaactattccctttgtaagtataagaacagtagccaaataaagtagagctttcttcattccaactatataatcaaaatgtaacaagctccaaaagatatcattcaaatgatataactaaggtttaagatgtgtaccaatt

SEQ ID NO: 186 - protein, 755 aa, Arabidopsis thaliana
MTSVFDEHKPSDDSHESKIVINGEEEVLEEENDNPIEEVRLTVPITDDPTLPVLTFRTWTLGLFSCILLAFVNQFFGFRSNQLWVSSVAAQIVTLPLGKLMAKTLPTKKFGFPGTNWSWSFNPGPFNMKEHVLITIFANTGAGGVYATSIITIVKAFYNRQLNVAAAMLLTQTTQLLGYGWAGIFRKFLVDSPYMWWPSNLVQVSLFRALHEKEDLQKGQQTRFRFFIIVFCVSFAYYIIPGYLFPSISAISFVCWIWKSSVTAQIVGSGLKGLGIGSFGLDWSTVAGFLGSPLAVPFFAIANFFGGFFIFLYIVLPIFYWTNAYDAQKFPFYTSHTFDQTGHTYNITRILNEKNFDINLDAYNGYSKLYLSVMFALLYGLSFGSLCATISHVALYDGKFIWGMWKKAKTATKDKYGDVHSRLMKKNYQSVPQWWFIAVLVISFAFALYACEGFDKQLQLPWWGLILACAIALFFTLPIGVIQATTNQQMGLNVITELIIGYLYPGKPLANVAFKTYGYISMSQALYFVGDFKLGHYMKIPPRSMFIVQLVATVVASTVCFGTTWWLITSVENICNVDLLPVGSPWTCPGDEVFYNASIIWGVIGPGRMFTKEGIYPGMNWFFLIGLLAPVPFWYLSKKFPEKKWLKQIHVPLIFSAVSAMPQAKAVHYWSWAIVGVVFNYYIFRRFKTWWARHNYILSAALDAGTAIMGVLIFFAFQNNDISLPDWWGLENSDHCPLAHCPLAKGVVVEGCPVF

SEQ ID NO: 187 - DNA, 2344 bp, Arabidopsis thaliana
cacataaagattcctagtcttatactctgtctctctctctctctctctttttcacactcacacacaaactaaaccggaatggccaccgccgacgaattctccgacgaagatacatcaccgattgaagaagtccgtttaacggtaacaaacaccgacgatccaacactaccggtttggacattcaggatgtggttcttgggtctaatctcatgttctctcctctctttccttaaccaattcttctcgtaccgaaccgaaccgctcgtaatcactcaaatcacggttcaggtggctacactacctatcggtcatttcttggccaaggtgcttcccaaaacccggtttgggttacccggttgtggatcggcccggttctcgctgaacccgggtccgtttaacatgaaagagcatgttttgatatcgatatttgcgaatgcgggtagtgctttcggatccgggtcggcttatgcggttggtatcatcacaattattaaagctttttatggccggagtatctcttttattgccggctggctcctcatcatcactacacaggtattgggatatggctgggccggtttactgaggaaatatgtggtcgaaccggctcatatgtggtggcctagcactctggttcaagtgtcactgtttagggcattgcatgagaaggacgaccaaaggatgacgagagcaaaattctttgtgatagcattagtctgtagttttggatggtacatagtccctggctatctcttcacaacactcacaagcatctcatgggtttgttgggcatttccaagatcagtcactgctcaacagattggttctggaatgagaggtcttggtcttggagcctttacactagactggaccgcggttgcctctttcttgtttagtccacttatcagccccttcttcgccatcgctaatgttttcatcggttatgttcttttgatctacttcgtcttgcctttagcctattggggatttgattcttataacgctacgaggtttcctatattttcgtcgcatcttttcacatcggttggtaatacatatgatattcctgcgatcgtgaatgataactttgagctcgatttagctaagtatgagcaacaaggaaggattaacttgagcatgttctttgctcttacctatgggcttggtttcgccaccattgcttctacgctcactcatgtagctctcttctatggcaaggaaatttctgagaggtttcgagtttcatacaaaggcaaggaagatatacacactaggttaatgaagagatataaagacataccttcatggtggttttactcaatgttggctgcgacactacttatctctcttgcattatgtgttttcttgaacgatgaggttcaaatgccttggtggggacttgtgttcgcaagcgcgatggctttcgtcttcacactcccgataagcatcataaccgcaacaactaaccaaacaccgggattgaatataataacagagtacgcaatgggactcatttacccgggacgacctatcgcaaacgtatgcttcaaagtctatggatacatgagtatggcacaagcagtctctttcttaaatgacttcaaacttggtcattacatgaagatcccacctagatccatgttcttggttcaattcatcggtacaattcttgccggaacaatcaacataacggtcgcatggtggcagttaaactctatcaaaaacatatgtcaagaggaacttctacctcccaacagtccatggacatgtccgggtgaccgtgttttcttcgatgcatcggtcatttggggattggtcggaccaaaacggatttttggttctcagggaaactatgcggccatgaactggtttttcctcggaggtgcattaggaccagtcatagtgtggtcattgcacaaagcgttcccaaaacgttcttggattccacttgtaaatctccctgttcttctaggagcaaccgcaatgatgccacctgcgaccgcggtgaactacaactcgtggatattggtggggacgatattcaacttgtttgtgttccggtacaggaaaagttggtggcagaggtataactacgttctctcagccgctatggatgccggtgtagctttcatggcggttttgttgtacttctcggtggggatggaggaaaagagtttggactggtggggaacaagaggtgaacattgtgatctagctaaatgtccaaccgctagaggagtaattgttgatggttgtccggttaaataatcttaaaggatccattggtgtgtttcaacaatgtatgatacacaaagtaactaattaagaatttcaaaaaaaaatc

SEQ ID NO: 188 - protein, 729 aa, Arabidopsis thaliana
MATADEFSDEDTSPIEEVRLTVTNTDDPTLPVWTFRMWFLGLISCSLLSFLNQFFSYRTEPLVITQITVQVATLPIGHFLAKVLPKTRFGLPGCGSARFSLNPGPFNMKEHVLISIFANAGSAFGSGSAYAVGIITIIKAFYGRSISFIAGWLLIITTQVLGYGWAGLLRKYVVEPAHMWWPSTLVQVSLFRALHEKDDQRMTRAKFFVIALVCSFGWYIVPGYLFTTLTSISWVCWAFPRSVTAQQIGSGMRGLGLGAFTLDWTAVASFLFSPLISPFFAIANVFIGYVLLIYFVLPLAYWGFDSYNATRFPIFSSHLFTSVGNTYDIPAIVNDNFELDLAKYEQQGRINLSMFFALTYGLGFATIASTLTHVALFYGKEISERFRVSYKGKEDIHTRLMKRYKDIPSWWFYSMLAATLLISLALCVFLNDEVQMPWWGLVFASAMAFVFTLPISIITATTNQTPGLNIITEYAMGLIYPGRPIANVCFKVYGYMSMAQAVSFLNDFKLGHYMKIPPRSMFLVQFIGTILAGTINITVAWWQLNSIKNICQEELLPPNSPWTCPGDRVFFDASVIWGLVGPKRIFGSQGNYAAMNWFFLGGALGPVIVWSLHKAFPKRSWIPLVNLPVLLGATAMMPPATAVNYNSWILVGTIFNLFVFRYRKSWWQRYNYVLSAAMDAGVAFMAVLLYFSVGMEEKSLDWWGTRGEHCDLAKCPTARGVIVDGCPVK

SEQ ID NO: 189 - DNA, 2458 bp, Glycine max
tgcgtgtcggtctctctggctcccaaaaggcacctctttctttctctctagctaacatcacgtaggcactcacgcacgccatgagctctgatccagaaaagcgggtgacaagcgaggtggtggaagacgatgaactctctcccatcgaggaggttcgtctcaccgtaaccaacaccgacgacccgacccgaccggtatggaccttccgtatgtggttcctgggtcttctctcctgctccctcctctcctttctcaaccagttcttcgcttaccgcacggagcctctcatcatcacacaaatcacagttcaggtcgctactctccctatcggccacttcatggccgcgtttctgcccacaaccacgttcagcatccccggattcgggtccaagagcttctccttcaacccgggcccgtttaacatgaaggagcacgtgctcattaccatattcgccaatgccggaagcgcattcggatccgggtcaccctatgcggtgggtatcgttaacattatcaaagccttttacggacgcagcatctcctttgctgcttcttggcttctcatcattacaacgcaggtgctaggatatggatgggccgggttacttagaaaatacgtggtggaaccggcccatatgtggtggcccagtaccctcgtccaagtctcacttttccgagctttgcatgagaaagatgaccaccgactttcacgggcaaagttcttctttattgcactagtgtgcagtttttcgtggtatgttgtccctggatacttgttcacaacgctcacaaacatttcatgggtgtgttggatattctccaagtcagttacagctcagcagatagggtcaggcatgaggggccttggagttggtgccctcacacttgattgggctgccgtggcatcattcttgttcagccctctaatctcacccttctttgccattgtcaatgtttttgtgggctatgcattaattgtctacgtggtcattcctgtatcatactggggcctcaatgtgtacaatgccaataggtttcccattttctcctcacacttgttcaccgcccaaggtcaaaaatacaacatacctaagattgtagacaaccattttgagctaaatgttgcagagtatgaaaagcaaggtagaattcatctcagtgtgtttttcgctctcacttacggctttggatttgccaccatagcatccaccctcacacatgttgtctgcttctatggaagggagattatggagcggtatcgtgcttcttccaaaggcaaagaagatatccacacaaaattgatgagaagatacaaagacataccttcttggtggtttcattcattgctgctcgtgacacttctggtttctctcgcactatgtatctttctaaaggaccaggttcagatgccctggtggggacttctctttgctggagtgctagcttttggatttacccttcccattagcattatcactgccaccacaaaccagacaccaggattgaatatcatcactgagtatgtctttggtctcatttaccctggaagaccaatagcaaacgtatgtttcaaaacatatggttacattagcatggcgcaagctgtttctttcctcagtgatttcaaacttgggcattacatgaaaatccctccaaggtcaatgttcttagttcagttcataggtacaatgcttgctggaaccattaacattggggtagcatggtggttgctgaactctatcaagaacatatgtcatgacgatctccttccagaaggcagtccctggacatgcccgggtgaccgtgtattctttgatgcatcagttatttggggtctggtgggaccaaagcgtatctttggttctcaaggaaactacagtgcaatgaattggtttttccttggaggtgcagtaggacccataattgtttggctattgcacaaagcatttcccaaacagtcatggattccactaatcaacctcccagttctattgggagcaactggaatgatgccaccagcaacaccattgaactacaatgcctggattttcgttggaacgattttcaacttctttatcttccgttacagaaagaaatggtggcagaggtacaactatgttctgtcagcagcacttgatagtggggttgcttttatgactgtcttgctctacttcgcactgggtttggaaaacaagagtctaaattggtggggaaatgatggtgaacattgtccactggcagtttgcccaacagcaaagggcgtaatagttgacggttgccctgcaaactagtgattgattttatagtttatacctcttttaatggtttcattacaaataccaagcatgaaaaacacgaatttatagcaaattcaaaatgtataacataaaatcactatatttccaagtaaatagcctgtgttacatggtttattatgcttcctaaaaaaaaaaaaaaa

SEQ ID NO: 190 - protein, 736 aa, Glycine max
MSSDPEKRVTSEVVEDDELSPIEEVRLTVTNTDDPTRPVWTFRMWFLGLLSCSLLSFLNQFFAYRTEPLIITQITVQVATLPIGHFMAAFLPTTTFSIPGFGSKSFSFNPGPFNMKEHVLITIFANAGSAFGSGSPYAVGIVNIIKAFYGRSISFAASWLLIITTQVLGYGWAGLLRKYVVEPAHMWWPSTLVQVSLFRALHEKDDHRLSRAKFFFIALVCSFSWYVVPGYLFTTLTNISWVCWIFSKSVTAQQIGSGMRGLGVGALTLDWAAVASFLFSPLISPFFAIVNVFVGYALIVYVVIPVSYWGLNVYNANRFPIFSSHLFTAQGQKYNIPKIVDNHFELNVAEYEKQGRIHLSVFFALTYGFGFATIASTLTHVVCFYGREIMERYRASSKGKEDIHTKLMRRYKDIPSWWFHSLLLVTLLVSLALCIFLKDQVQMPWWGLLFAGVLAFGFTLPISIITATTNQTPGLNIITEYVFGLIYPGRPIANVCFKTYGYISMAQAVSFLSDFKLGHYMKIPPRSMFLVQFIGTMLAGTINIGVAWWLLNSIKNICHDDLLPEGSPWTCPGDRVFFDASVIWGLVGPKRIFGSQGNYSAMNWFFLGGAVGPIIVWLLHKAFPKQSWIPLINLPVLLGATGMMPPATPLNYNAWIFVGTIFNFFIFRYRKKWWQRYNYVLSAALDSGVAFMTVLLYFALGLENKSLNWWGNDGEHCPLAVCPTAKGVIVDGCPAN

SEQ ID NO: 191 - DNA, 2512 bp, Glycine max
gacgatttcgttttgtagagaacacatacatacattttcattttcagaggaatgatcatggaagaatcctcggtacacgagatcaaaacccctctcctgtcatctaacaaggaggaagatgaagttggaagcagtactagccataggcagcaaaatgaagagaactcgcccataaaacaagtggccctaacggtgccaaccaccgatgacccatctcttccagttctgacgttccgaatgtgggtgttgggaactctatcatgcgtgctgctgtcgttcctgaaccagttcttctggtaccgcatccagcctctcaccatcaccgcgatctccgcccagatcgcggtggtgccgctcggccaactcatggccgcaacgatcactaagcgcgtgttcttcagaggaacacgctgggaattcactctcaatccgggacccttcaacgtcaaggagcacgttctcatcaccatcttcgccaactccggcgccggcaccgtctacgccatccacgttgttaccgctgtcaaaatcttttaccacaaacacatctccttctttgtctccttgcttgtggtcatcaccacacaggtattgggtttcggatgggctggcatatttagaagatacctggtagagccagcggcaatgtggtggccagcaaatttagttcaagtttcactcttcagggccctgcacgagaaggatgagcgaccaaagggagggttaacgcgatcgcagttcttcgtaatcgcatttttgtgcagcttcgcctattacgtgttccccggttacattttccaaatgctaacctccctctcttggatttgctggttatatcccaacaatgttctggcccaacaacttgggtcgggcctaaacgggcttggcataggagcaattgggcttgactggtccaccatttcgtcctacctcggaagcccactcgcaagcccatggtttgccactgccaatgtcgcggtgggtttcgtgtttgtgatgtacgttctgactccgctgtgctattggctcgacttgtacaacgccaaaaccttccccattttctcggacgaactcttcacggagaaaggtcaagtttataacatcacagccataatagactccaatttccacctagaccttgcggcttatgagagacaaggtagattgtacatcagcactttctttgccatgacctatggtgttggctttgctgcactcaccgccaccattatgcatgttgctctctttcacggaagagaaatatgggagcaaagtaaatcaagttttaaggaaaagagcgtggacattcacacgaagcttatgcggaggtacaaacaggtgcctgaatggtggttcgtgtgcatactcatggcaaccattgcagccaccgtcttcacctgcgaatactacaacgatcagctgcaactgccttggtggggtgttctcctcgcatgtgccattgctatattcttcactctccccattggaattattactgcaatcacaaatcagagtccggggttgaacataatcacggaatacatcatagggtacatctacccgggataccctgtggcaaacatgtgcttcaaggtttatggttacatcagcatgacgcaggccatcactttcttgcaagacttcaagcttggtcactacatgaaaatccctcccagaaccatgttcatgggacaggttgtgggaacgcttgtcgcgggttttgtgtatttgggcactgcgtggtggttaatggaaacgatcccagacatatgcaaagacacgtcctctgtatggacgtgtccaagtgacacagtgttctacgacgcatcggttatttggggtttgattgggccgagaagaatattcggagacctgggaacgtacgagaaagtgaattggttcttcctaggaggagccattgctccattactggtttggttggcggcaaggtcgttcccacaacaagagtggattaggctcataaacatgccagtgttgataggggccaccggaatgatgcctccggcgacggcggtgaattacacgagctggatcattgcggggtttctctctggcttcgttgtgttcagatacaagcccgaatggtggaagcgtcacaattatgtgctctcaggggcacttgatgcagggcttgccttcatgggggtgcttttgtatctatgccttggattggaggacattagtctcaattggtgggggaatgaccttgacggatgtacattggctcactgccccaccgccaaagtagtcgaggttcaaggttgtgccgttttcacttgaacataactgtaaattaaatcataattagggtgaatatgctagttaaggaattaaaacttaaaagtgaaaagtcttttcctaataaaaacattattaatgcatctagatgaatttttaatgaaaactttctattacattatctctttaagaacattgactgttcaaacttaaatatatttttaatgggcttaattataaatctaaaaaaaaa

SEQ ID NO: 192 - protein, 749 aa, Glycine max
MIMEESSVHEIKTPLLSSNKEEDEVGSSTSHRQQNEENSPIKQVALTVPTTDDPSLPVLTFRMWVLGTLSCVLLSFLNQFFWYRIQPLTITAISAQIAVVPLGQLMAATITKRVFFRGTRWEFTLNPGPFNVKEHVLITIFANSGAGTVYAIHVVTAVKIFYHKHISFFVSLLVVITTQVLGFGWAGIFRRYLVEPAAMWWPANLVQVSLFRALHEKDERPKGGLTRSQFFVIAFLCSFAYYVFPGYIFQMLTSLSWICWLYPNNVLAQQLGSGLNGLGIGAIGLDWSTISSYLGSPLASPWFATANVAVGFVFVMYVLTPLCYWLDLYNAKTFPIFSDELFTEKGQVYNITAIIDSNFHLDLAAYERQGRLYISTFFAMTYGVGFAALTATIMHVALFHGREIWEQSKSSFKEKSVDIHTKLMRRYKQVPEWWFVCILMATIAATVFTCEYYNDQLQLPWWGVLLACAIAIFFTLPIGIITAITNQSPGLNIITEYIIGYIYPGYPVANMCFKVYGYISMTQAITFLQDFKLGHYMKIPPRTMFMGQVVGTLVAGFVYLGTAWWLMETIPDICKDTSSVWTCPSDTVFYDASVIWGLIGPRRIFGDLGTYEKVNWFFLGGAIAPLLVWLAARSFPQQEWIRLINMPVLIGATGMMPPATAVNYTSWIIAGFLSGFVVFRYKPEWWKRHNYVLSGALDAGLAFMGVLLYLCLGLEDISLNWWGNDLDGCTLAHCPTAKVVEVQGCAVFT

SEQ ID NO: 193 - DNA, 2535 bp, Hordeum vulgare
gagcaattaatccgatgccgggacagcccaaggaggagaggaggaggtagaggaccctcacccaacaaggcaggtactccgtcgtacgctagctgagctagagctgtccggccatggcgtcctcctcccagccccaccgagaagcagacgaggaggagctccggcgccgcggccatggcgacggcatcacctccccgctcctgccgtcgacgtcgcggagctcgccggagcgggatgatgatgatgaggaggaggaggagaactcgccaatcgagcaggtggcgctgacggtccccgcgggcgacgacccggacactcctgtcctaaccttccggatgtgggtgctgggcatggcgtcctgcgccgtcctctccttcctcaaccagttcttctggtaccgcaaggagccgctcaccatcaccgccatctccgcgcagatcgccgtcgtgccgctcggccggctcatggccgcggcgctccccgagcgcgccttcttccccggcaggccgtacgagttcaccctcaacccgggaccgttcaacgtgaaggagcacgtgctcatcaccatcttcgccaacgccggcgcaggcaccgtctacgccatccacgtggtcaccgccgtccgcgtcttctacggcaagaacctcaccttcttcgtctccctactcgtggtgctcaccacgcaggtgctcgggttcgggtgggcggggatattccggcggtacctcgtcgagccggcgaccatgtggtggccgtccaacctcgtgcaggtctccctcttcagggcgctccatgagaaggaggtgcggagcaaaggcggcttcacgcgcagccagttcttcctggtggccttcgtctgcagcttcgtctactacatcttcccaggctacctattccagatgctaacctccctctcctggatctgctgggtcttccccaactccgtgtttgcccagcagctcggctcaggcctctatggccttggcatcggctccatcggcctagactgggcttccgtctcctcctacctcgggagccccctcgccagcccctggttcgccactgccaacgtcgctgcaggattcttcatcatcatgtacgtgatcacgcccatcgcatactggttcaacttctacaaggcgcggaactttcccatcttctctgacgggctcttcaccgagtccgggcacaagtacaacatcacgagcatcgtggactcccagttccatttcgatacgaaggcctacgagaagaatggtccactgtacctcagtaccttcttcgccatcacatatggcgttggtttcgcatcccttaccgcgacgatcgtccatgtcctcctcttccacggaagtgaaatttggcagttaagtaaatcagctttccaagagaagagggtggatgtacacacaaagcttatgaggagatataagcaggtccctgagtggtggttcatctgcatccttattgttaacattgccgtcaccgtatttgcttgtgaatactacatcgagcaactacagctgccctggtggggtgtactgctcgcatgtgccattgcctttttctttaccctcccaatcggaattatcacagcaactacaaaccagactccgggattgaacatcatcacagagtacatcatggggtacctgtaccctggacggcccgtcgcgaatatgtgcttcaaggtatatggctacatcagcatgagccaagctctgacgtttctgcaggattttaagttgggccactacatgaagattcccccaaggaccatgttcatggctcaggtggtgggaactctgatagcagcatttgtgtaccttggaacggcatggtggctgatggactcaatccccaacatctgcaacaccgagctcctcccaccaggcagcccttggacctgccctggagatcacgtgttctacgacgcatcagtcatatggggtcttattagcccacgcagaatatttggagacttaggaacttactcggcggtgaactggttcttcctggggggagccatcgccccactcctcgtctggtttgcacacaaggcattcccagaccagaactggatcttgcttatcaacatgcccgtgttgatcggttccaccggccagatgccacccgccactgcagtcaactacatcacatggatatttgttgggtttttgtcaggctatgtggtttatagatatcggcgtgactggtgggagcgacacaattacctgctctcgggtgcactagatgctggtttggcattcatggccgtgttaatttacctgtgcctaggcttggagaacatcagtttgaactggtggggcaatgacttggatggatgccccctggcttcttgccccactgctaaaggtatatttgttgagggttgcccagtgtatacatgaccatttcctcatgtctggtactccctgtttgcagaaattggaaagtgccaacgagcatgcagggatcaatgtacataataaatgtttatattcaaatcaacagatgagaaaaaaaaaaaaaaaa

SEQ ID NO: 194 - protein, 765 aa, Hordeum vulgare
MASSSQPHREADEEELRRRGHGDGITSPLLPSTSRSSPERDDDDEEEEENSPIEQVALTVPAGDDPDTPVLTFRMWVLGMASCAVLSFLNQFFWYRKEPLTITAISAQIAVVPLGRLMAAALPERAFFPGRPYEFTLNPGPFNVKEHVLITIFANAGAGTVYAIHVVTAVRVFYGKNLTFFVSLLVVLTTQVLGFGWAGIFRRYLVEPATMWWPSNLVQVSLFRALHEKEVRSKGGFTRSQFFLVAFVCSFVYYIFPGYLFQMLTSLSWICWVFPNSVFAQQLGSGLYGLGIGSIGLDWASVSSYLGSPLASPWFATANVAAGFFIIMYVITPIAYWFNFYKARNFPIFSDGLFTESGHKYNITSIVDSQFHFDTKAYEKNGPLYLSTFFAITYGVGFASLTATIVHVLLFHGSEIWQLSKSAFQEKRVDVHTKLMRRYKQVPEWWFICILIVNIAVTVFACEYYIEQLQLPWWGVLLACAIAFFFTLPIGIITATTNQTPGLNIITEYIMGYLYPGRPVANMCFKVYGYISMSQALTFLQDFKLGHYMKIPPRTMFMAQVVGTLIAAFVYLGTAWWLMDSIPNICNTELLPPGSPWTCPGDHVFYDASVIWGLISPRRIFGDLGTYSAVNWFFLGGAIAPLLVWFAHKAFPDQNWILLINMPVLIGSTGQMPPATAVNYITWIFVGFLSGYVVYRYRRDWWERHNYLLSGALDAGLAFMAVLIYLCLGLENISLNWWGNDLDGCPLASCPTAKGIFVEGCPVYT

SEQ ID NO: 195 - DNA, 2637 bp, Hordeum vulgare
gtggccctcgaaagccacctctccactccggtccagactctagagcagagcacgggtgcgtagtcacaggcaagccgccattaaaccgcctcacgcgcaatgggtgagatagcggcggacgagcgcgggctcgccggcggcaaggggtcggggtcggagtcggagtcggaggagacgtccccgatcgaggaggtccggctgactgtcccgcccggcgacgacccgacgctgccggtgtggacgttccggatgtggagcatcgggctgctctcctgcgcgctcatgagcttcctcaaccagttcttctcctaccggacggagccgctgatcgtgacccagatcacggtgcaggtggcgtcgctgcccatgggccacttccttgcccgcgtgctcccgcgccgcaccttccgggcgcccggcggcggggagtggagcctcaacccggggcccttcaacatgaaggagcacgtgctcatctccatcttcgccaatgccggctacgccttcggcaacggcaacgcctacgccgtcatgatcgtcgacatcatccgcgccttctacggccgctccatctccttcatcgccgcctggctcctcatcaccaccacccaggtgctcgggtacgggtgggcggggctgatgcgcaagtacgtggtggagccggcgcacatgtggtggccgagcacgctcgtccaggtctcgctcttccgggcactgcacgagaaggaggagtcttccaagggctcgcgtcagatctcccgctcaaagttcttcctggtggcgctcatctgcagcttcgcgtggtacgtcgtgccgggctacctcttcccggcgctcacctccatctcatgggtctgctgggtcttctccaagtccgtgacggcgcagcagctcggctcgggtatgaagggcctgggcctcggagccttcacactcgactggtcggccgtctcctccttcctcttcagcccactcatctcacccttcttcgccaccgccaacatcttcgtcggctatgtctgcttcctttacgtgctcgtgcccacggcatactgggggatgaacctctacaacgccaagacattccccatattctcctcgcacctgttcatgtctaacggatccgcatatcagatcactgacattgtgaaccagcagttccagcttgacacggaggcgtatgcaaggctcggaaggataaacctcagcaccttcttcgcgctctcttatgggctcagcttcgccaccattgcctccaccatcacgcacgtcggcatcttctacggaaaggagatctaccaaaggttccgagcttcgcagcaggaggagcctgacatccacacgaagctgatgaggaagtacgacgacataccagcgtggtggttctactccctgacggtattgtcgatgacagtgtccctcatcctctgcaccgtcctcaaggaccaggttcagctcccatggtggggcctcctcttcgcctgtggcatggccttcgtcttcacgctccccataagcatcattactgcaaccactaaccagactcctggcctgaatgtcatcactgaatacgcaatggggctaataatgcctggataccccatcgccaatgtctgcttcaaggtgtacggctacatgagcatgtcgcaggcagttgcattcctctcagatttcaagctcggacactacatgaagatacctccaagatcaatgttcattgttcagtttgccggtacgctggtggccgggactgtcaacctcagcgtggcatggtggctgcttggctctgtcgagaacatctgccaggaccaactgctgccaccagacagcccatggacgtgccctggtgaccgtgtcttctttgatgcatcggttatctggggccttgttggcccgaagcgcattttcgggtcacatggtaactatgaagccgtcaactggttcttcctcatcggcgcagcaggccctgtcatcgtgtacattttccacaggatattccccaggcagaggtggatactaatgataaacctgccagtgctcatcggcgctacagccaacatgccaccagcgacagccgtgaactacaactcgtggctgctgataggcaccatcttcaacttcttcgtgttccggtaccggaagaagtggtggcagaggtacaactacatcctctctgccgcgctcgatgcaggcgtcgcgttcatggcggtgctgctgtacttcacactgaccatggagaaccggacagtcaactggtggggcacggccggtgagcactgtcctctggcctcatgccccactgctaaaggggtagacttgggccctgatagcgcgtgccctgtgttctaagctaaatctctttcaacctcaaggtacagctacaagattagtcacgatcgattcctgttgtgttagtgtcatgtcatgatcaaagattcctattgtactctccaccaaaagtgagagagcaaagcatctccatgtgtgtaaactgtaaaggtcatagtaaccacgcaagagagacaagacaaaaagctatcagcagcaatggtgctgcaatcagtcatttgggcaacacaaatgcatgtagttctggaatcctataaactttgacacttgttgcaaaaaaaaaaaaaa

SEQ ID NO: 196 - protein, 749 aa, Hordeum vulgare
MGEIAADERGLAGGKGSGSESESEETSPIEEVRLTVPPGDDPTLPVWTFRMWSIGLLSCALMSFLNQFFSYRTEPLIVTQITVQVASLPMGHFLARVLPRRTFRAPGGGEWSLNPGPFNMKEHVLISIFANAGYAFGNGNAYAVMIVDIIRAFYGRSISFIAAWLLITTTQVLGYGWAGLMRKYVVEPAHMWWPSTLVQVSLFRALHEKEESSKGSRQISRSKFFLVALICSFAWYVVPGYLFPALTSISWVCWVFSKSVTAQQLGSGMKGLGLGAFTLDWSAVSSFLFSPLISPFFATANIFVGYVCFLYVLVPTAYWGMNLYNAKTFPIFSSHLFMSNGSAYQITDIVNQQFQLDTEAYARLGRINLSTFFALSYGLSFATIASTITHVGIFYGKEIYQRFRASQQEEPDIHTKLMRKYDDIPAWWFYSLTVLSMTVSLILCTVLKDQVQLPWWGLLFACGMAFVFTLPISIITATTNQTPGLNVITEYAMGLIMPGYPIANVCFKVYGYMSMSQAVAFLSDFKLGHYMKIPPRSMFIVQFAGTLVAGTVNLSVAWWLLGSVENICQDQLLPPDSPWTCPGDRVFFDASVIWGLVGPKRIFGSHGNYEAVNWFFLIGAAGPVIVYIFHRIFPRQRWILMINLPVLIGATANMPPATAVNYNSWLLIGTIFNFFVFRYRKKWWQRYNYILSAALDAGVAFMAVLLYFTLTMENRTVNWWGTAGEHCPLASCPTAKGVDLGPDSACPVF

SEQ ID NO: 197 - DNA, 2580 bp, Malus domestica
gacacacgtcaactagtcctagtccactgagagaaaacagagggagagggagagaactttcaactttgtttcaatggcgtccaagaaccctagtgacccagagaaagcgccaaaaggcactaacggcgccggcgaccattacccacatcacgattttccagaatcggacggtcacgagccatgcaaaatagaggaggtggcgctggtggtgccggagaccgacgacccgacgatgccggtgatgacattcagggcatggttcttggggataacttcctgtactatcctaatcttcctcaacaccttcttcacctaccgcacgcagccgctggcgatctcggccattctcatgcagattactactctgcccatcgggaagttcatggcctccgctctcccccgccgcgagcacagccttcttgggtggcggttcagcctcaaccccgggcccttcaacataaaggagcatgttattattaccatttttgcgaattgtgggatttcttacggtgggggtgatgcctactcgattggcgcaatcaccattatgaaggcttattacaagcagagcttgagctttatccttagcctcgttatcgtcctcaccactcaggtgattgggtatggatgggctgggattctcaggaggtacttggtcgacccggtggaaatgtggtggccttccaacgttgctcaggtttctctgtttagagcactccacgaaaaagaccataaagcgaaaggccttacccggatgcagtttttcctcattgccttgacagcaagctttctctactatgcactccctggctatcttttccccatcttgacgttcttctcatgggtctgctgggcttggccacacagtatcacagctcagcagataggctcaggttacaatggacttggtgttggtgccttcaccctcgattgggctgggatttctgcttatcacggcagccccctcgtcacgccatggacttccattctcaatgttggggttggatttgtcatcttcatctacatcattatgcctctttgttactggaagtttaacactttcgatgctcagacgttccctatattttccaacaagctcttcacttctactgggcataaatacgacactaccaagatcttaacaccccagtttgatcttaatattgatgcctataatagttacggcaagctttatcttagcccccttttcgctttgtccattggatcaggatttgcaagatttactgcaaccctcgttcatgtggcactgtttcacggaagtgctattttgaagcaaagcaaatcggcaatgaagaatgcgaaaatggatatccatgagaaattgatgaaaaattacaaacaagtgcctgagtggtggttccttgttttgttaacggtgagcatcatcctgtccttggtgatgtcttttgtgtggaaagaaactgtgcagctgccatggtggggtttgctgtttgcctttgtcttgtcttttatcgtaaccctccctgttggagtcattcaagctaccactaaccaacaacctggatttgatatcatagcacaattcatgattgggtatgttctaccaggaaaaccaattgcaaacttgcttttcaaaatttatggacgaatcagcactgtccacgctctttctttcctgtctgacctcaaacttgggcactatatgaagattccacctcggtgcatgtacactgctcagctggtgggaactctagtttccggtgttgtgaaccttgcagttgcatggtggatgctggaaagcatcgacaacatatgcgatgttgaatcccaaaatccaaacagcccgtggacttgtcctaaatacagagtcaccttcgatgcttctgttatatggggtctgattggaccaaggcgactgtttggacctggaggattgtataggaacttggtgtggctattccttgttggagttttcttgccggttccaatctgggtaatgagcaaaatcttcccagacaagaaatggattcccttgatcaacatgccagtcatcctttatggctttgcggggatgccacctgcaactcccactaacattgcaagctggcttatcactggaggtatcttcaactactttgtgttcaaataccacaagcgctggtggcagaaatacaactacgtcctgtctgcagcgttggatgctggtacagctttcatgggcgtcctcctcttcttcgccttgcagaatccaaagcacgaattgaaatggtgggggactacactcgatcattgtcctctagcgacatgccccattgcaccaggtattcacgttgacggatgtccagttttttaaatagccaaaaaatagtggacaccaagacatatatttgaaggatcaaacctaacgaggagggaactcgtcgtagttgtggaggaagaggagtttgtacgtacactcttagcaaatgtgtggattttagggttgggagttggttctagtttttattgctctctagaataaccagaaatgtatcattcagatgaaatgtatgggtgttattgttaattatataagaatcgatttaatctgaaaaaaaa

SEQ ID NO: 198 - protein, 753 aa, Malus domestica
MASKNPSDPEKAPKGTNGAGDHYPHHDFPESDGHEPCKIEEVALVVPETDDPTMPVMTFRAWFLGITSCTILIFLNTFFTYRTQPLAISAILMQITTLPIGKFMASALPRREHSLLGWRFSLNPGPFNIKEHVIITIFANCGISYGGGDAYSIGAITIMKAYYKQSLSFILSLVIVLTTQVIGYGWAGILRRYLVDPVEMWWPSNVAQVSLFRALHEKDHKAKGLTRMQFFLIALTASFLYYALPGYLFPILTFFSWVCWAWPHSITAQQIGSGYNGLGVGAFTLDWAGISAYHGSPLVTPWTSILNVGVGFVIFIYIIMPLCYWKFNTFDAQTFPIFSNKLFTSTGHKYDTTKILTPQFDLNIDAYNSYGKLYLSPLFALSIGSGFARFTATLVHVALFHGSAILKQSKSAMKNAKMDIHEKLMKNYKQVPEWWFLVLLTVSIILSLVMSFVWKETVQLPWWGLLFAFVLSFIVTLPVGVIQATTNQQPGFDIIAQFMIGYVLPGKPIANLLFKIYGRISTVHALSFLSDLKLGHYMKIPPRCMYTAQLVGTLVSGVVNLAVAWWMLESIDNICDVESQNPNSPWTCPKYRVTFDASVIWGLIGPRRLFGPGGLYRNLVWLFLVGVFLPVPIWVMSKIFPDKKWIPLINMPVILYGFAGMPPATPTNIASWLITGGIFNYFVFKYHKRWWQKYNYVLSAALDAGTAFMGVLLFFALQNPKHELKWWGTTLDHCPLATCPIAPGIHVDGCPVF

SEQ ID NO: 199 - DNA, 2268 bp, Oryza sativa
atgggcgagggcgagttcgtcgacgtcgagcgcggcgtggtcgctgaaggggcgttggacgacgacgcgtcgccgatcgaggaggtccggctgacggttccggtcactgacgactcgtcccttccggtgtggacgttccggatgtggacactcggcctgctctcgtgcgtgctcatgagcttcctgaaccagttcttctcctaccgcaccgagccgctcatcgtcacccagatcaccgtgcaggtggcctcgctgcctctgggccacatcctcgcccgcgtgctgccgcgccgcaagttcaaggcccccgcgctgctcggcggcggggagtgcagcctcaacccggggcccttcaacatgaaggagcacgtgctcgtctccatcttcgccaacgccggctgcgccttcggcagcgggtccgcctacgccgtcatgatcgtcgacatcatccgcgccttctacgggcggtccatctccctcttccccgcatggctcctcatcaccaccacgcaggtgctcggctacgggtgggcggggctgatgcgcaggtacgtggtggagccggcgcaaatgtggtggcccggcacgctcgtgcaggtgtcgctgttcagggcgctgcacgggaagggggaagagaaggaggagaataaggagggcagcggcggcgggatgtctcaggccaagttcttcctgatcgcgctcgcctgcagcttcctgtggtacgccgtgccgggttacctgttcccgacgctgacctccgtctcgtgggtctgctggatcttctccaagtccgtcacggcgcagcagctgggctccggcatgaagggcctgggcctcggcgccttcaccctcgactggacggccgtgtcagccttcctgtacagcccgctgatctcgccgttctttgccaccgccaacatcttggccggctacgtgctcctgatgtacgtggtcgtgccggtgtcgtactggggcctcgacctgtacaacgcccggaggttccccatcttctcgtcgcacctgttcacggccaccggcagcacatacgacatcacggccatcgtgaacgaccgcttcgagatcgacatggacgggtaccatcggatggggcggatcaacatgagcacgttctttgcgctgtcctacgggctcggcttcgcgacgatcgcggccaccgtcacgcacgtggcgctgttccacgggaaggagatctaccgccggttccgcgcgtcgcagagggacaagcccgacgtgcacacgaggctgatgaagagctaccgcgacgtgccgagctggtggttctacgcgatgctcgcgctgtccatggccgtctcgctcttgctctgcaccgtcctcaggtcggcggtgcagctcccgtggtggggtctcctcttcgcctgcgccatggccttcgtgttcacgctgccgatcagcatcatcacggccacgaccaaccagacgccagggctcaacatcatcaccgagtacgtcatcgggctcatgcttccgggcaagcccatcgccaacgtctgcttcaaggcgtacggctacatgagcatgtcgcaggccgtgtccttcctgtccgacttcaagctcggccactacatgaagataccccccaagtccatgttcctcgtgaagttggtcggcacggtggtcgcctccacggtcaacctcgtggtggcgtactggctgctgggttccatccccaacatctgccaggacgcgctcctcccggcggatagcccgtggacgtgcccgaacgaccgcgtcttcttcgacgcgtccgtcatctggggcctcgtcgggccgcgccgcatcttcgggccactcggcaactacggcgcgctcaattggttcttcctcgctggcgccgtgggacccgtcattgtgtacttgctccacagggcgttccccagcaagacctggataccgatgatcaacctgccggtgctcatcggagcgacctcctacatgccgccggcaacggccgtgaactacaactcctggctgatcatcgggatcatcttcaacttcttcgttttccggtacaggaagctgtggtggaagaggtacaactacatcctctcggctgcgctcgacgccggcgtcgcgttcatggcggtgctgctctacttctcgctgtcgatggagaaccggagcatcagctggtggggtacggccggcgagcactgcccgctggcctcatgccctaccgccaaagggataaacttgggcgctgatagcgtctgccctgttgtgttataa

SEQ ID NO: 200 - protein, 755 aa, Oryza sativa
MGEGEFVDVERGVVAEGALDDDASPIEEVRLTVPVTDDSSLPVWTFRMWTLGLLSCVLMSFLNQFFSYRTEPLIVTQITVQVASLPLGHILARVLPRRKFKAPALLGGGECSLNPGPFNMKEHVLVSIFANAGCAFGSGSAYAVMIVDIIRAFYGRSISLFPAWLLITTTQVLGYGWAGLMRRYVVEPAQMWWPGTLVQVSLFRALHGKGEEKEENKEGSGGGMSQAKFFLIALACSFLWYAVPGYLFPTLTSVSWVCWIFSKSVTAQQLGSGMKGLGLGAFTLDWTAVSAFLYSPLISPFFATANILAGYVLLMYVVVPVSYWGLDLYNARRFPIFSSHLFTATGSTYDITAIVNDRFEIDMDGYHRMGRINMSTFFALSYGLGFATIAATVTHVALFHGKEIYRRFRASQRDKPDVHTRLMKSYRDVPSWWFYAMLALSMAVSLLLCTVLRSAVQLPWWGLLFACAMAFVFTLPISIITATTNQTPGLNIITEYVIGLMLPGKPIANVCFKAYGYMSMSQAVSFLSDFKLGHYMKIPPKSMFLVKLVGTVVASTVNLVVAYWLLGSIPNICQDALLPADSPWTCPNDRVFFDASVIWGLVGPRRIFGPLGNYGALNWFFLAGAVGPVIVYLLHRAFPSKTWIPMINLPVLIGATSYMPPATAVNYNSWLIIGIIFNFFVFRYRKLWWKRYNYILSAALDAGVAFMAVLLYFSLSMENRSISWWGTAGEHCPLASCPTAKGINLGADSVCPVVL

SEQ ID NO: 201 - DNA, 2878 bp, Oryza sativa
aggggagaaacaagcctacagatgatggctcggtctatcccgccggagtccggtgacgagaacgtctcggcttctgccgatggtgtgtatgcctccttgttcattctctgcatgaattgcctttcctacactgggaatgcaaatgaaattctctcgtggtagaagatcgaaattaagctactagctagtttctcttggagaatgaaatcaacaacagttttcttccacttcccatttgttcgtgcaaaattgctgctaaaatatttaacgattttactcatgtttctttttttttccccaatggaatctgaacggctcagtgttgctttgctaaaaacatgagggtttgagaacttctctcgcaaagacatgcaggcggcctattttagggacagaagatgacaaaagaacatcaaggaagagggcgtacgtgtagagaaagacggtgaaatattttgccagccagccggccggccggagtccgacgatcgagcacattccgatggacactgcaggcggtacaacaaaccacgcctaaaacctcctttacttagttttgtgtgtgtgtgtgtgcgcactgcagaggagggcatggaggaggaggtgaacgaccacccgatcgaggaggtccggaacacggtgccggtgaccgacgacccgtcggagccgtgcctgacgttccgggtgtgggtgctggggctctcgtcgtgcgtgttcctcgccttcgtcaacgagttcttcatgtaccggaccacgcagctgagcatcggcacggtggtggtgcaaatcatcacgctgcccatcggccgcctcatggcgtcgacgctgccggcgaggcgcctccgcgtcggcggctggtccttctccctcaacccggggcccttcagcctcaaggagcattgcctcatcatcatcttcgccggcgccggcgccagcggcgtctatgccatgaacatcatcgccatcgtcaaggtgttctacaagcgccagatcagcccctacgccgccatgctgctcgcccagaccacccagttgcttgggtatggatgggccggattgttcaggaagtacctggttgactcagcctacatgtggtggccgtcaaacctcgtccaagtcaccctcttcagggcgatgcacgaggaggagaagaggaacaaggggcagctgacgcggctgcagttcttcatcatggtgatgacgtgcagcttcgcctactatatcgtacccagctacctgttcccggcgatcagcaccatctcggtgctgtgctggctgtacagggactcggtgacggcgcagcagatcggctccggcgcctcgggcctcggcgtcggctccttcggcctcgactggaacaccgtggtgggcttcctcggcaacccgctggcgtcgccggcgttcgccatcttcaacgtcatggccggcttcgcgctcagcacctacgtcgccgtgccgatcctctactggaccgacacctacaacgccaagcgcttcccgctcgtgtcgtcgcacgtcttcaacgccgccggcggccgctacgacaccgcccgcatcctcgacccggccaccttcacgctcaacctcagggagtacgacgcctacggccgcatcaacctcagcatcctcttcgccatcaactacggcatcggcttcgcgggcctcatgtccacgctctcccacgtcgcgctctaccacggcaaggacatttggggcttgtggcggaaggcaacggcggagcaggcgaacggcggcggcaaggagcgccaagacgtgcacacgagaatcatgaagaggaactacaaggccgtgccacagtggtggtttcacttgatgctggccatcgtgatggcattgtcgctgtacacctgtgaggggtttggccggcagcttcagctgccatactggggtctcctccttgcctgtgccatcgccttcaccttcacgttgcccatcggcgtcatctctgccacgaccaacatgcaaccagggttaaacatcatcacagagctcatcatcgggtacctgtacccggggaagccattggcgaatgtggtgttcaagacctacggctacataagcatgactcaggcgctgacgtttgtgtcggatttcaagctggggcactacatgaagataccgcccaggtccatgttcatggtgcagctggcagggacggtggtggcgtcgacggtgcacttcgcgacggcgtggtggctgctgacgacggtgaggaacatctgcgacgtggacagcctgccgctggggagcccgtggacgtgccccggcgaggacgtcttctacaacgcctccatcatctggggcgtcgtcggaccgctccggatgtttggccgtctcggcaactactggcagatgaactacttcttcctcgtcggcgtcctcgcgccggtgcccgtctggctgctgtcgcgccggtacccgcgcagcgcgttgctccgggacatcaacctgccgctcgtcctcgccggcgccagcgggctgctcccggcgaggtccgtcaacttcgtcatgtgggggctcgtcgggttcgtgttcaaccacgtcgtgtaccgccggtgcagggcgtggtggatgcggcataactacgtgctcgccgcggggctcgacgccggcgtcgccttcatgggcgtgctcaccttcgtctcgctaggatacttcgacatatacggggtgcagtggtggggtggcgccgccgatgatcactgccccttggcgtcgtgccccacagcacctggggtgtttgccaggggatgcccgcctgtaccttcttgattgatcaggacaccgcatctacatgtatatactccatatgacagatggttactcaaatgtatatattatatcctcttgtcttcct

SEQ ID NO: 202 - protein, 757 aa, Oryza sativa
MASLKSPVAAEEQAATAAAAAAKGEGERCPVEEVALVVPETDDPTTPVMTFRAWTLGLASCVVLIFLNTFFTYRTQPLTISGILAQILVLPAGQFMAAVLPSREVRLLGGRLGSFNLNPGPFNIKEHVIITIFANCGVSYGGGDAYSIGAITVMKAYYKQSLSFLCALLIVLTTQILGYGWAGMLRRYLVDPADMWWPSNLAQVSLFRALHEKEGGDGGKGSSSRGPTRMRFFLIFFFASFAYYALPGYLLPILTFFSWACWAWPHSITAQQVGSGYHGLGVGAFTLDWAGISAYHGSPLVAPWSSIANTAAGFVMFIYLIVPLCYWKFDTFDARKFPIFSNQLFTASGQKYDTTKVLTREFDLNVAAYESYGKLYLSPLFAISIGSGFLRFTATIVHVALFHGGDIWRQSRSAMSSAAAKMDVHAKLMRRYKQVPQWWFLVLLVGSVAVSLVMSFVYREEVQLPWWGMLFAFALAFVVTLPIGVIQATTNQQPGYDIIAQFMIGYALPGKPIANLLFKIYGRISTVHALSFLADLKLGHYMKIPPRCMYTAQLVGTVVAGVVNLAVAWWMLGSIDNICDVEALHPDSPWTCPKYRVTFDASVIWGLIGPARLFGRHGLYRNLVWLFLAGAVLPVPVWLLSRAFPEKKWIALINVPVISYGFAGMPPATPTNIASWLVTGTIFNYFVFKYRKGWWQKYNYVLSAALDAGTAFMGVLIFFALQNAHHELKWWGTAVDHCPLASCPTAPGIAVKGCPVF

SEQ ID NO: 203 - DNA, 2504 bp, Oryza sativa
ggcgaggaccagtaccaatggagcaaccacggcttgagctcagcagcctggaaggtcaccggagtagcgaaaatccagagagcagagatgagaaaaccgaagaggaggtagacgactgcccgatcgaggaggtgcggctgacggtgccgatcaccgacgacccggcattgccggcgctgacgttcaggacatggctgctggggctcatctcctgcgcgatgctggccttctccaaccagttcttcggctaccggcagaatccgctctacatctcgtcgctgtccgtgcagatcgtcgtcttgccgctgggcaagctgatggctgcttgcctccccaagaaggtgttcagggtgaagggcacggcatggtcgttctcgctcaacccggggccgttcaacctcaaggagcatgtgctcatcaccatcttcgccaacaccggatccaactccgtctacgccgtcggcattatcaccattgttaaggccttctaccgccgggagattcatcctcttgctgccatgctgctcacccagacaacccagctgatgggatatggttgggctggcctcttcagaaagtttcttgtggactcaccttacatgtggtggccttcaaacttggtacaggtttcactcttcagagctctgcatgagaaggagaagaggccaaagggagggacgacgaggctgcagttcttcctgaccgtgctcatcaccagcttcgcctactacattgtgccgaactacctgttcccgaccatctccaccatctcggtggtgtgcctggtgtggaagaagtcggtgacggcgcagcagatcggctccggcgtgtacggcctgggcgtcggctcgttcggcctggactgggcgacggtggccggcttcctcggcacgccgctgtcgacgccggcgttcgccatcgtcaacatcatggccggcttcttcctcatcgtctacgtgatcgtgccggcggcgtactgggccgacgcgtacggcgccaagcggttcccgatcatctcctcccacgtgttctccgccaacggcagccggtacgacgtcaaccaggtgctcgacacggcgacgttcgagttcagccaggccgggtacgacgccgcgggcaagatcaacctgagcatcttcttcgccttcacctacggcctcagcttcgccacgctcgccgcgacgctgtcgcacgtcgcgctcttccacggcgggtcgatatggcggcagaccaaggcggcggtgagcgggcagggcggcgacgtgcacaccaggctgatgaagcgcaactacgccgcggtgccgcagtggtggttccaggtgatgctcgtcgccgtgctcggcctctccgtgttcacctgcgagggcttcggccagcagctgcagctcccgtactggggcgtcctcctcgccgccggcctcgccttcttcttcaccctccccatcggcatcatcaccgccaccaccaatcagcaacctgggctgaacgtgatcaccgagctgatcatcggatacctgtacccggggaggccgctcgccaacgtcgccttcaagacgtacggctacatcagcatgtcccaggcgatcatgttcttgcaggatttcaagctgggccactacatgaagatcccaccacgctccatgttcatcgtccagctcgtcgggacggtgctggcgtcgtcggtgtacttcgggacgtcgtggtggctgctggagagcgtgagcaacatctgcgacccggcgaagctgccggaggggagcccgtggacgtgccccggcgacgacgtcttcttcaacgcctccatcatctggggggtggtcggcccgctgcggatgttcggccgcctcggcctgtacgccaagatgaactacttcttcctcgccggcgcgctggcgccggtgccggtgtgggcgctgtcgcgggcgttcccgggcagggcgtggatcgggctcgtcaacatgccggtgctcctcggcgccacggggatgatgccgccggcgaggtcggtgaactacctcatgtggggcgccgtggggctcgccttcaactacgtcgtgtaccgccggtacaaggggtggtgggcgcggcacaactacgtgctgtccgccgggctggacgccggcgtggccttcatggggatcctctcgtacgccgtgctgcagtcgaggggcatcaatggcgtcaactggtgggggctgcaggtggacgaccactgcgccctggctcgttgccccacggcgcccggggtcagcgcccccggctgcccggtgcagtgagcagagcagaccattggcatcaatcagctgggaaaacttagggcagttaggattataggtctatatagctcctcaagtttataaatgatcgttgaccaaaaatggcattggaaaagatcagcacacagcactactgtgtaattgtgcgtaaaacaaaagcgccgtatgtaactatgtatgtagtgatgaatagtctgattatatgtcaaacgcatgtgcttgttctgc

SEQ ID NO: 204 - protein, 737 aa, Oryza sativa
MEIEHLGARAAAAAGEDDQSPVEQVRLTVPTTDDPSLPVWTFRMWTIGLLSCAMLSYINQFFSYRSEPIVITQITVQVAALPIGHFLARVLPKRKFTVFGRECSLNPGPFNVKEHVLISIFANAGAAFGNGGAYAIDIINIIKAFYHRSISFPTSLLLVITTQVLGYGWAGLMRKYVVEPAHMWWPQSLVQVSLLRALHEKENLRMTRAKFFLIALICSAAWYVVPGYLFPTVGAVSWLCWAFPRSVTMQQIGSGMSGLGVGAFTLDWATVVSFLGSPLVYPFFAIVNVWVGFVLLVYVMLPIAYWVLNLYQASTFPFFSASLFDHTGEEYRISEIVNDRFELDTDAYARQGKIHLSLFFATSYGLGFATIAATLSHVTLFYGTEMYRRFRQAARENPDVHTRLMRRYDDIPNWWFYGMLALAMVAALLLCTVFKDEVQLPWWALLCAVAVAAFFTLPISVITATTNTTPGLNIITEYVMGLIMPGKPIANVCFKVYGYISMNQAVSFLTDFKLGHYMKIPPRSMFLVQFIGTIVAGTVNMSVAWWLLSTVPHICDKKHLPEGSPWTCPGSRVFFDASVIWGLVGPRRIFGPLGYYGALNWFFLGGLAGPAVVWLLARALPRHAGWIRLIHLPVLLGATANMPPASTLNYTAWCSVGAVFNYLVFRRRKAWWQRYNYVLSAAMDAGVAIMGVLIYFCLSSRGITPDWWGNSDINIDHCDLSTCPTAKGVIVEGCPVF

SEQ ID NO: 205 - DNA, 2594 bp, Oryza sativa
tgccagcaattccgtcactttgacagattattctgaagcgcgaggttttgcaggcgcctcctcgcgcggggtagcaatggagattgagcatctcggcgcccgcgcggccgccgccgccggcgaggatgaccagtcgccggtggagcaggtccggctgaccgtgccgacgaccgacgacccgtctctgccggtatggacgttccggatgtggaccatcgggctcctctcctgcgccatgctctcctacatcaaccagttcttctcctaccgctctgagcccatcgtcatcacccagatcactgtccaggtggcggcgctgccaatagggcacttcttggcacgcgtgctgccgaagaggaagttcacggtgttcgggcgggagtgctcgctgaaccctgggccattcaacgtgaaggagcacgtcctgatatccatcttcgccaacgccggcgccgcgttcggcaacggcggcgcctacgccatcgacatcatcaacatcatcaaggcgttctaccaccgcagcatctcctttcccaccagcctcctcctcgtcatcaccacccaggtgttgggctacggatgggcagggctgatgaggaagtacgtggtggagccggcgcacatgtggtggccgcagagtctcgtgcaggtttccctcctgagggcgttgcacgagaaggagaacctgcggatgacgcgggccaagttcttcctgatcgcgctgatctgcagcgcggcgtggtacgtggtgccgggctacctgttcccgaccgtgggcgcggtgtcgtggctgtgctgggcgttcccgaggtcggtgacgatgcagcagatcgggtccggcatgagcggcctcggcgtcggcgccttcacgctcgactgggccaccgtcgtctccttcctgggcagcccgctcgtgtacccgttcttcgccatcgtcaacgtctgggtcggcttcgtgctcctcgtctacgtcatgctgcccatcgcctactgggtgctcaacctgtaccaggccagcacgttcccctttttctccgcgagcctgttcgaccacaccggcgaggagtacaggatctcggagatcgtcaacgacaggttcgagctcgacacggacgcctacgcgcggcaggggaagatccacctcagcctcttcttcgccacctcctacggcctcggcttcgccaccatcgccgccaccctgtcccacgtcacgctcttctatggaacggagatgtatcgcaggttccggcaggcggccagggagaacccggacgtgcacacgaggctgatgaggaggtacgatgacatccccaactggtggttctacggcatgctcgcgttggccatggtggcggcgctgttgctctgcaccgtgttcaaggacgaggtgcagctgccgtggtgggcgctactctgcgccgtggccgtggccgccttcttcacgctccccatcagtgttatcaccgccaccacaaacacgaccccagggttgaacatcatcacggagtatgtgatggggctgatcatgccggggaagccgatagccaacgtgtgcttcaaggtgtatggttacatcagcatgaaccaggccgtctccttcctcactgacttcaaactcggccactacatgaagattcctccaagatccatgtttctagtccagttcatcgggacgatcgtggcggggacggtgaacatgtcggtggcgtggtggctgctgtcgacggtgccgcacatctgcgacaagaagcacctcccggaggggagcccgtggacgtgcccgggctcccgcgtgttcttcgacgcgtcggtgatctggggactggtcgggcctcgccggatcttcggcccgctcggctactacggcgcgctcaactggttcttcctcggcgggctggcagggccggcggtggtgtggctgctggcgagggcgctgccgcggcacgccggctggatcaggctcatccacctccccgtgctcctcggcgccaccgccaacatgccgccggcgtcgacgctcaactacacggcgtggtgctccgtcggcgccgtgttcaactacctggtgttccgccgccgcaaggcgtggtggcagcggtacaactacgtgctgtcggcggcgatggacgccggcgtggccatcatgggcgtgctcatctacttctgcctgtccagccgcggcatcaccccagactggtggggcaacagcgacatcaacatcgaccactgcgacctctccacctgccccaccgccaagggcgtcattgtggagggatgtcccgtcttctgatcgatcatccatccaatatacatatttcccccgtagatgtgttcttcgtgcgaaactagatcagtaaaatcaatcagaatctgaatctctactcgtttaatatggcaggactgatgctgttcttatttaaagttgtatatatcatttgggtttttaggtttccaaatgctcttctttttcgtgttttaaccaagttcagtgagctcagttacccagttagtatattatagaattggtttcgctccaatggagttttattgctgtgttttaattgagttcaatgagatatatattggttaagtcc

SEQ ID NO: 206 - protein, 760 aa, Oryza sativa
MASSHHQEVQEQGHGDGEEEEQDNSQITSPLLRSSMRLGSPEENSPVEQVALTVPVGDDPATPVLTFRIWVLGTASCVVLSFLNTFFWYRKEPLTVTAISAQIAVVPLGRLMAAALPERVFFRGRPWEFTLNPGPFNVKEHVLITIFANAGAGSVFAINVITAVRVFYGKRISFFVSLLVVLTSQVLGFGWAGIFRRYLVEPAAMWWPSNLVQVSLFRALHEKERRSKGGMTRTQFFLVAFVCSFAYYIFPGYLFQMLTSLSWICWIFPKSVLAQQLGSGLHGLGIGAIGLDWSSISSYLGSPLASPWFATANIAAGFFIYIYVITPIAYWINLYKAQNFPIFSDGLFTVTGQKYNISTIIDSQFHFDTKAYEKNGPLYISTFFSISYGLGFACLTATVVHVLLFHGSEIWQLSRSAFQDKKMDIHTKLMKRYKQVPEWWFISILIASVAITMFTCEYYIEQLQLPWWGVLLACALAIFFTLPIGIVTATTNQTPGLNIITEYIMGYLYPGRPVANMCFKVYGYIGPQQALAFLQDFKLGHYMKIPPRTMFMAQVVGTLIAAFVYLGTAWWLMDTIPNICNTELLPPGSPWTCPYDHLFYDASVIWGLIGPRRIFGDLGTYSAVNWFFLGGAIAPLLVWFAHKAFPGQKWILLVNMPVLIAGISQMPPATSVNYTAWIFVAFLSGYVVYKYRRDWWERHNYLLSGALDAGLAFMAVLLYLCLGLEKISLNWWGNDLDGCPLASCPIAEGITVQGCPVASA

SEQ ID NO: 207 - DNA, 2610 bp, Oryza sativa
acgcctccacacacacatggcagccatggcgtcctcccaccaagaagaccgcgaggaggaggaggagcacagccatggcgacgacgagatcaccgccccgttcttgcggccatcgacgtcgagggggtcgccggagttggaggaggaggagaactcgccgatcgagcaggtggcgctgacggtgccggtgagcgacgagccggagacgccggtgctgacgttcaggatgtgggtgctggggacggcgtcgtgcgcggtgctctccttcctcaaccagttcttctggtaccgcaaggagccgctcaccatcaccgccatctcggcgcagatcgccgtcgtgccgctcggccgcctcatggcggcggcgctgccggagcgcgccttcttccgtgggcggccgtgggagttcacgctcaacccggggccgttcaatgtcaaggagcacgtgctcatcaccatcttcgccaactccggcgccggcacggtgtacgccatccacgtcatcaccgccgtccgcgtcttctacggcaagcacatctccttcttcgtctccctcctcgtcgtcctcaccacccaggtgcttggattcgggtgggcgggaatattccggcggtatctggtggagccggcggcgatgtggtggccgtccaacctcgtgcaggtctccctcttcagggcgcttcacgagaaggaagcaaggagcaaaggtgggctgacgcgcaaccagttcttccttgtggcattcatctgcagcttcgcatactacatcttcccaggctacctgttccagatgctcacctccctctcctggatctgctgggtcttcccccactctgtgcttgcacagcagctcggctcaggtctcagtggccttggcattggcgcgatcggtctcgactggtccaccgtctcctcctacctcgggagtcctcttgctagcccatggtttgccactgcaaatgttgctgctggcttcttcttcatcatgtacataatcacaccgattgcttactggttcaatttctacaaggcacaaaacttccccatattttctgatggtctcttcacctcaactggccaaaagtacaatatctcaagcattgttgattctcatttccatttcgacacaaaggcctacgagaagaatggtccactatacctcagcactttctttgctgtcacatatggcgttggttttgcatcccttaccgcaacaattgttcatgttctcctcttccacggaagtgaaatatggcaattaagtaaatcagctttccaagaaaaaaggatggacatacatacaaaacttatgaggagatataagcaggttcctgagtggtggtttgtctgcatcctcattgctaacattgccgtcaccatatttgcttgtgaatactacattgagcaactccagttgccctggtggggtgttttacttgcatgtgccattgccttcttcttcaccctcccaattgggataattacagcaacaacgaaccagactccaggcttgaacatcatcacagagtatatcatggggtacttgtaccctggacgaccggtagcaaatatgtgtttcaaggtatatggttacatcagcatgagccaggccctgacatttcttcaagattttaagttgggtcactacatgaagattccaccaaggaccatgtttatggctcaggtggtgggaactttgattgcagcatttgtgtacattggaacggcatggtggctgatggagacaattcccaacatctgtaacactgagctcctcccatcagatagcccttggacctgcccaggagatcatgtgttctatgatgcatcagtcatatggggtcttattagcccacgcagaatatttggggacttaggcacctactcggcggtaaactggttctttttgggtggagctattgcccctgtccttgtctggtttgcacacaaggcattcccaaaccagaactggatcttgctcataaacatgcctgtgctgattggtgccactggccagatgccgcctgccactgccgtcaactacacaacatggatacttgttggtttcttgtcaggttatgtggtctatagatatcgacgtgactggtgggagcggcacaattatctgctttcaggtgcattggatgctggtttggcattcatggctgttttgatttacttgtgcctaggcttggagaacatcagtttgaactggtggggcaatgacttggatggatgtcctctggcttcttgccccactgctaaaggtgtagttgttgacggatgcccagtctatacttgaggatctcctattgtatgtcagtcctggggagaatttggacaatcttaaggagcatgtaggggccaacgtaaataggataaacactgtttttttcccagaccatgtaaagatgagaaattggtgttgtattattgtattccttgagttttcagaattgtaatggaagttttgaaaggtacttatttgggtcaccaaacccattgttattcaacactggaaacaaaatgtagcatacttgcgcgaaaggaatatgcagttatattgccaagtacaaataaataaacaaagaatactgatgctttgacatc

SEQ ID NO: 208 - protein, 761 aa, Oryza sativa
MAAMASSHQEDREEEEEHSHGDDEITAPFLRPSTSRGSPELEEEENSPIEQVALTVPVSDEPETPVLTFRMWVLGTASCAVLSFLNQFFWYRKEPLTITAISAQIAVVPLGRLMAAALPERAFFRGRPWEFTLNPGPFNVKEHVLITIFANSGAGTVYAIHVITAVRVFYGKHISFFVSLLVVLTTQVLGFGWAGIFRRYLVEPAAMWWPSNLVQVSLFRALHEKEARSKGGLTRNQFFLVAFICSFAYYIFPGYLFQMLTSLSWICWVFPHSVLAQQLGSGLSGLGIGAIGLDWSTVSSYLGSPLASPWFATANVAAGFFFIMYIITPIAYWFNFYKAQNFPIFSDGLFTSTGQKYNISSIVDSHFHFDTKAYEKNGPLYLSTFFAVTYGVGFASLTATIVHVLLFHGSEIWQLSKSAFQEKRMDIHTKLMRRYKQVPEWWFVCILIANIAVTIFACEYYIEQLQLPWWGVLLACAIAFFFTLPIGIITATTNQTPGLNIITEYIMGYLYPGRPVANMCFKVYGYISMSQALTFLQDFKLGHYMKIPPRTMFMAQVVGTLIAAFVYIGTAWWLMETIPNICNTELLPSDSPWTCPGDHVFYDASVIWGLISPRRIFGDLGTYSAVNWFFLGGAIAPVLVWFAHKAFPNQNWILLINMPVLIGATGQMPPATAVNYTTWILVGFLSGYVVYRYRRDWWERHNYLLSGALDAGLAFMAVLIYLCLGLENISLNWWGNDLDGCPLASCPTAKGVVVDGCPVYT

SEQ ID NO: 209 - DNA, 2666 bp, Oryza sativa
acttttttctaaagtggcaaggcaaaatccaattaaatattgacgaaccggaggaaccaaaacgaccacgcgtgagaactgagaaggctcgcagcacacacaaccatgatgctccaccacgaagcaagtgtgcaacaagcgcgagaggaagaagaagagcttgatcaccatggcgatccgatgatcacctcccctctcttgcgaccatcgacgtcgggcagctcgccggagaatggagaggaggagaactcaccggtggagctggtggcgctgacggtgccagtgagcgacgagccggagacgccggtgctgacgttcaggatgtgggtgctggggacggcgtcgtgcgcggtgctctccttccttaaccagttcttctggtaccgcaaggagccgctcaccatcaccgccatctccgcgcagatcgccgtcgtgccgctcggccgcctcatggcggcgacgctgccggagcacgccttcttccgtggccggccgtgggagttcacgcttaatccggggccgttcaatgtcaaggagcacgtgctcatcaccatcttcgccaactccggcgccggcaccgtctatgccatccacgtcatcaccggcgtccgtgtcttctacgggaaaaccctctccttcttcatctccctccttgtcgtcctcacaacacagtaccatcagatgctggggttcggctgggcgggaatattccggcgttatcttgttgagccggcgtctatgtggtggccatccaacctagtgcaggtctctctgttcagcgcacttcatgagaaggaagcacggagaaaaggtggcttgacgcggaaccagttcttcctggtggcattcgtctgcagctttgcatactacatcttcccaggctacctattccagatgctcacctccctctcctggatctgctgggtcttccccagctctgtccttgcccaacagcttggttcaggtctccgaggcctcggcgttggtgcaatcggtctcgactggtcatctatctcctcctaccttgggagccctcttgctagcccatggtttgccactgtaaatgttggtgttggcttcttcatcgtcatgtacataatcacaccaattgcatactggtttaatttctacaaggcacaaaatttccccatattttctgatggcctcttcacctcgactgggcaaaaatacaatgtatcaagcattgttgactcccatttccattttgacaccaaggcctatgagaagaatgggccactatacctcagtacttcccttcttgtcacatacggtgttggttttgcaacccttgctgcaacaattgttcatgctctcctcttccatggaagtgaaatttggctattaagtaaatcagcttttcaagaaaaaaggatggacatacacacgaaacttatgaggagatataaacaggtccctgagtggtggttcatatgcatccttattgctaacatcggaacgaccatatttgcttgtgaatactacaatgaggaactccaattgccctggtggggtgttttgtttgcatgctccattgcctttttcttcaccctcccaatagggataatcaaagcaacaacaaatcagactccaggcctgaatgtcatcacggagtacattattgggtatctgtaccctggacgacccgttgcaaatatgtgcttcaaggtatatggttacatcagcatgaaacaagctttggcatttcttgaagattttaagctgggtcactacatgaagattccaccgaggacaatgtttatggctcaggtggtgggaacttcaattgcagcatttgtgtatattggcacagcatggtggctaatggagacaatccccaacatctgcaacactgagctcctcccgtcagatagcccttggacctgcccaggtgaccatgtattctatgatgcatcagtcacatggggacttattagcccgcgcaggatatttggggacttaggcacttattcagctctaaattggttctttttgtgtggagctattgcccctctacttgtctggtttgcacacaagacattcccaggccagaactggatcttactcatcaagacgcctgtactaattggtgccaccttccagatgcctcctgctactgccgtcaactacacgacttggatacttgttgggttcttgtcaggttatgtggtctatagatatcgacgtgattggtgggagagacacaattatctgctttcaggtgcactggatgctggtttggctttcatggcggtcttaatttacttgtgcttaggcttggaggacatcagtctgaactggtggggaaatgacttggatgggtgtcctttggcttcttgtcccactgctaaaggtatagttgtcaagggatgtgcagtctatacttgaggatctcctattgcttcttgtcccactgctacagtgttacccagacctccatgggtgcaagccaatatgattagatctaatttgacccttgtcatctataaacatcagtagaaccagctttgattcatagctggaaattagcaatgtagtttcagggttagtggtcataacttgtatcctatcagtattctcgaaaaaacttgtatcctaccaaacaagttaaattttgatctctgaactgtccattctttgcaagttgc

SEQ ID NO: 210 - protein, 766 aa, Oryza sativa
MMLHHEASVQQAREEEEELDHHGDPMITSPLLRPSTSGSSPENGEEENSPVELVALTVPVSDEPETPVLTFRMWVLGTASCAVLSFLNQFFWYRKEPLTITAISAQIAVVPLGRLMAATLPEHAFFRGRPWEFTLNPGPFNVKEHVLITIFANSGAGTVYAIHVITGVRVFYGKTLSFFISLLVVLTTQYHQMLGFGWAGIFRRYLVEPASMWWPSNLVQVSLFSALHEKEARRKGGLTRNQFFLVAFVCSFAYYIFPGYLFQMLTSLSWICWVFPSSVLAQQLGSGLRGLGVGAIGLDWSSISSYLGSPLASPWFATVNVGVGFFIVMYIITPIAYWFNFYKAQNFPIFSDGLFTSTGQKYNVSSIVDSHFHFDTKAYEKNGPLYLSTSLLVTYGVGFATLAATIVHALLFHGSEIWLLSKSAFQEKRMDIHTKLMRRYKQVPEWWFICILIANIGTTIFACEYYNEELQLPWWGVLFACSIAFFFTLPIGIIKATTNQTPGLNVITEYIIGYLYPGRPVANMCFKVYGYISMKQALAFLEDFKLGHYMKIPPRTMFMAQVVGTSIAAFVYIGTAWWLMETIPNICNTELLPSDSPWTCPGDHVFYDASVTWGLISPRRIFGDLGTYSALNWFFLCGAIAPLLVWFAHKTFPGQNWILLIKTPVLIGATFQMPPATAVNYTTWILVGFLSGYVVYRYRRDWWERHNYLLSGALDAGLAFMAVLIYLCLGLEDISLNWWGNDLDGCPLASCPTAKGIVVKGCAVYT

SEQ ID NO: 211 - DNA, 2825 bp, Oryza sativa
ggcacagctcccaactcctcccattatccatccatggcgtcctcccatcaccaagaagtacaagagcaaggccatggagatggagaggaagaggaacaagataatagccaaatcacctctccactgttgcgatcctcaatgcggctcggctcgccggaggagaactcgccggtggagcaggtggcgctgacggtgccggtgggggacgacccggcgacgccggtgctgacgttccggatatgggtgctgggcacggcgtcctgcgtcgtgctgtccttcctcaacaccttcttctggtaccgcaaggagccgctcaccgtcacggccatctcggcgcagatcgccgtcgtgccgctcggccgcctcatggccgccgcgctgccggagcgcgtcttcttccgtggccggccgtgggaattcaccctcaaccctggcccgttcaacgtcaaggagcacgtgctcatcaccatcttcgccaacgccggtgccggttccgtcttcgccattaacgtcatcaccgccgtccgagtcttctacgggaagcgcatctccttcttcgtctccctcctcgtcgtcctcaccagccaggtgctgggattcgggtgggcgggaatattccggcggtatctggtggagccggcggcgatgtggtggccgtccaacctcgtgcaggtctccctcttcagggcacttcatgaaaaggaacggaggagcaaaggcggcatgacacgcacccagttcttcttggtagcatttgtgtgcagctttgcctactacattttcccaggctacctattccagatgctcacttccctctcctggatttgttggatctttcccaaatctgtgctcgcacaacagcttggatcaggtctccatggccttggcattggtgcaattggactcgactggtcatccatctcgtcatatctcggaagcccactggctagcccatggtttgccactgccaacattgctgccggcttcttcatctacatttatgtaatcacaccaatcgcctactggattaatctctacaaggcacaaaacttccctatcttttcagatggccttttcacagtgactggacagaagtacaacatctctaccattatagactcacagtttcattttgatacaaaagcctatgagaagaatggaccattatacatcagcaccttcttttctatcagctatggtcttggttttgcatgtcttactgcaacagttgtccacgttcttcttttccatggaagtgaaatttggcagctaagcagatcagcttttcaagataaaaagatggacatacatacaaagcttatgaagaggtacaaacaggttcctgaatggtggttcatctccatccttatagccagtgttgcaatcaccatgttcacttgtgagtattacatagaacaattgcagttaccctggtggggggtactacttgcatgtgcccttgcaattttcttcacccttccaattggaatcgtcacagcaacgacaaaccagactccaggcttgaatatcatcacggaatacatcatggggtacttgtatcctggacgacctgtcgcaaacatgtgcttcaaggtatatggttacattggcccacagcaagccctagcattcctacaagattttaagctgggacactacatgaagattccaccaaggaccatgtttatggctcaggtggtgggcactttgatagcagcatttgtgtaccttggaacagcatggtggctcatggatacaatccctaacatatgcaacaccgagctcctccccccaggcagcccttggacctgcccttatgatcatttattctatgatgcatcagtcatatggggccttattggcccacgcagaatatttggtgatttaggcacttattctgctgtcaactggttcttcttggggggtgccattgctcccctcctcgtctggtttgcacacaaggcattcccaggtcagaaatggatcctacttgtcaacatgcctgtgctgatcgccggaatcagccagatgcctcctgccacttcagtcaactacacggcatggatatttgtagcatttttgtcaggttatgtggtctataagtaccgtcgtgactggtgggagagacacaattatctactttcaggtgcccttgatgctggtttggcattcatggctgtcttgctatatttatgcctaggactagagaaaatcagtttgaactggtggggtaatgatttggatggttgtccattagcttcttgccccattgcggaaggtataactgtacaggggtgtccagtggcaagtgcatagccaagtttcttctcatccacagtaccgccggcaatggtatctcaatcatcttaaggaggatgcaaagatcaaagaaccatgcagagaggctttaaacaactcaaaatgaagaccaaaaagaaaatgtccatatgttacaaggaagatgatactacaaggtgtaccgaatacaaaaataagtaaagttatttggtgcatgctaaattgttgccggtgacagaaaacagattatgataatagatgaactgaatttctgaaaccaacactgaattgaaagacagtagccatcgtccatagaaatagttaaagtctgaacatgattccacttacctgtaaaggtaacatcaggatcaccttagcctttaatcatcacaagaaccttgcaggaaaaagtaagaaattcagatgttacttttgctttgagggaaaatgaaacaatacggtcagcatgtaatcctgtatgaaacatggataatataaactgcattatatattgtttcattggaagt

SEQ ID NO: 212 - protein, 752 aa, Oryza sativa
MEQPRLELSSLEGHRSSENPESRDEKTEEEVDDCPIEEVRLTVPITDDPALPALTFRTWLLGLISCAMLAFSNQFFGYRQNPLYISSLSVQIVVLPLGKLMAACLPKKVFRVKGTAWSFSLNPGPFNLKEHVLITIFANTGSNSVYAVGIITIVKAFYRREIHPLAAMLLTQTTQLMGYGWAGLFRKFLVDSPYMWWPSNLVQVSLFRALHEKEKRPKGGTTRLQFFLTVLITSFAYYIVPNYLFPTISTISVVCLVWKKSVTAQQIGSGVYGLGVGSFGLDWATVAGFLGTPLSTPAFAIVNIMAGFFLIVYVIVPAAYWADAYGAKRFPIISSHVFSANGSRYDVNQVLDTATFEFSQAGYDAAGKINLSIFFAFTYGLSFATLAATLSHVALFHGGSIWRQTKAAVSGQGGDVHTRLMKRNYAAVPQWWFQVMLVAVLGLSVFTCEGFGQQLQLPYWGVLLAAGLAFFFTLPIGIITATTNQQPGLNVITELIIGYLYPGRPLANVAFKTYGYISMSQAIMFLQDFKLGHYMKIPPRSMFIVQLVGTVLASSVYFGTSWWLLESVSNICDPAKLPEGSPWTCPGDDVFFNASIIWGVVGPLRMFGRLGLYAKMNYFFLAGALAPVPVWALSRAFPGRAWIGLVNMPVLLGATGMMPPARSVNYLMWGAVGLAFNYVVYRRYKGWWARHNYVLSAGLDAGVAFMGILSYAVLQSRGINGVNWWGLQVDDHCALARCPTAPGVSAPGCPVQ

SEQ ID NO: 213 - DNA, 2202 bp, Physcomitrella patens
atggattatctgatatcaattaacatctcagagcccaagcagctcctcacacttcattctttacccacagtcctctcagtgcaactgacggtggccaccaccgatgaccccagcctaccatgtctgacgttcagaacgcttgtgcttggaactctggcgaatgttgttcttacagtgaccaacacattctttagctatcgctcagaaccgcttcatgtttccgcgattgccgttcagattatggccctcccgcttggccgtttgatgtcccgcttgctaccaggagaacccatcggctttcccttgattccaaggaggttctcgctcaatcctgggcccttcaacgtcaaagagcacgtactgatcaccatctttgctaacacagggtccggggcaatgggcgccatgttggtcaatgtcgtgaaagcgttttacaagcagaggttggacttcgttccagctattctcttcgtgttagcaactcaaattatggggtatggttctgcagggctgtaccgcaagctgttggtggagccggctcaaatgtggtggccacacacgttggtgaatgtgtctctcttccggacattgcacgagaaggaagagaaacggacactgtctcgagtccaatttttctgcatttgccttgtggcaagcttcgcgtactacgttctcccagggtacctcttcagctccttgaccaccatctcagtggcgtgtatcttatatcccagatccgtcactgctcagcaagtaggatctggactcaggggcttgggtgttggctcgttctccttggattgggcaacgatctcggcgtttcgtgggagcccgcttggagttcctttcttcgctcttgcgaacgccgcagtggggttcgtcttttacctgtatgtcataatcccaattacgtattggtttaatgtatacgacgccagaaagtttccaatcttctcgagcaagtcgtttgctgataatggctctccgtttgacatccaccgagttgtgaaccacgacttgaccttgaatccgaaagcttatgaaggttacagtcagctgcacttgagcattctgtatgcaatgacaaacgccatgggcttcgctgtcattggagcagcgataacacacgtcgtcctcttccatggaaaggacattgtacaaggatcaagagcagctttcagggacaagacgcaagacatccatacccagcttatgcagacctacaagcctgttccacagaaatggttttggatactgctgagcgtttccctggttctatccatagtcggtactgaagtatataaagatcagctgcagctaccttggtggggcgttttgttggggtttgttttagccaccgccttcgcacttcctttcggtgtgcttgtggccaccgcaaatcaggcaccaggaattaacgttttgtccgaaatggtaatggggtatataatgcctgagaagccagtggccaatatctgcttcagaatatacggcagcagcaacttgatgcacacaatatccttcttaagcgatttcaagctgggtcattacatgaagatccctccgcgcaccatgttcattgtacaggtttgggggtccattctctcggcactggtgtgcttgggtacaacatggtatcttctagatgcaatccctaacatctgtaatccagcgctactcccacctggaagtccttggacatgccccaacgacagtgtccaattcacagcttctgtaatctggggactcataggcccatcgagcacattcggaacgcgaggcatctacggcaaactcaactggttctttgtcatcgggatcttcgccccagttccaatctacatcgctgtgaaagttttccccaaagctacttggctcaagtgggtcaacatgccaatcatactcattggaggcctcaccatgccgccagcatctcctgtaaataatgtgatgtggctatccgtgggtatgttcttcaatggcttcatcttccgccgacacaaaacgtggtggaagcgttacaactatcttctgtcggcggccttagacacaggaactgccttcatgggattacttttatgggtctgctttgatcagggtcttggcacattagagtggtggggaaaccaaggtgatcactgcccactagcacactgcccgactgctgctggcatctcaatcaaagggtgcccagttttctaa

SEQ ID NO: 214 - protein, 733 aa, Physcomitrella patens
MDYLISINISEPKQLLTLHSLPTVLSVQLTVATTDDPSLPCLTFRTLVLGTLANVVLTVTNTFFSYRSEPLHVSAIAVQIMALPLGRLMSRLLPGEPIGFPLIPRRFSLNPGPFNVKEHVLITIFANTGSGAMGAMLVNVVKAFYKQRLDFVPAILFVLATQIMGYGSAGLYRKLLVEPAQMWWPHTLVNVSLFRTLHEKEEKRTLSRVQFFCICLVASFAYYVLPGYLFSSLTTISVACILYPRSVTAQQVGSGLRGLGVGSFSLDWATISAFRGSPLGVPFFALANAAVGFVFYLYVIIPITYWFNVYDARKFPIFSSKSFADNGSPFDIHRVVNHDLTLNPKAYEGYSQLHLSILYAMTNAMGFAVIGAAITHVVLFHGKDIVQGSRAAFRDKTQDIHTQLMQTYKPVPQKWFWILLSVSLVLSIVGTEVYKDQLQLPWWGVLLGFVLATAFALPFGVLVATANQAPGINVLSEMVMGYIMPEKPVANICFRIYGSSNLMHTISFLSDFKLGHYMKIPPRTMFIVQVWGSILSALVCLGTTWYLLDAIPNICNPALLPPGSPWTCPNDSVQFTASVIWGLIGPSSTFGTRGIYGKLNWFFVIGIFAPVPIYIAVKVFPKATWLKWVNMPIILIGGLTMPPASPVNNVMWLSVGMFFNGFIFRRHKTWWKRYNYLLSAALDTGTAFMGLLLWVCFDQGLGTLEWWGNQGDHCPLAHCPTAAGISIKGCPVF

SEQ ID NO: 215 - DNA, 2327 bp, Populus trichocarpa
cctctcactctcggataccttcgcctaccaatgggttctcttgaaatagaaggaaaaccccaaaacccgaacatgaacgaaaatattgaagaagacgacggcgtgtctcccattgaggaggtccgtctaactgttccaacacgcgacgatcatacccttccagtatggacctttcggatgtggttccttggaatagcctcatgcattattctatcttttctgaacactttcttttcctaccggaccgaacctctcacaatatctatgatatcggtacaggttgtgactctccctattggtcgcttcatggccaaaaccttgcctactgccaagttcagggttcctggatttggtggtcgcgagttttcccttaatcctgggccttttaatgttaaagagcatgtgctcatttccatttttgctaatgtggggagctcaactgcctatgccgttggtattatcgatataattatggctttctataaaaggaagatatcgtttttggctagttggattcttgttttaactactcagatgctggggtatggatgggctgggatcatgaggaagtatgtagtggatccagcagagatgtggtggccgcttagtcttatgcaagtttctctcttcagggctctgcatgagaaagataacagccgcatgtcacgagggaaattcttcttgatcgctctaatctgtagcttctcatggtatgtgtttcctggataccttttcccggctattggaaccatttcgtgggtgtgctgggcattccctaagtcagtgacagcccagcagcttggctcaggaatgagaggacttggtattggagctttcgggcttgactggtctgtcatagcctcgttcattggcagcccacttatcaccccgttctttgccgctgtcaatgtccttgtgggatatgctgcatttatgtacgtaatattgccaatagcatactggcgttttaatctctacaatgcgaagacgtttccaattttctcctcacatttatttgacactaaaggacacgtgtataacgtatctgccatagttgacaacaactttgagctagatgtggccgcatttcagaggcaaggaaacataaatttgagtgtgttcttttcgctgacgtatgggattggttttgctgccattatgtccaccctcacgcatgtgctcgtgtttaatggaaaggaaatatggcaacagtttcgagcttcatacaagggaaagatggatgttcacacaagattaatgaagaggtatgaggacattcctggctggtggttccacctgacgctagtgctgtcttttttactttctctcgtactgtgcattgtaatgaaagaccaagtccaaatgccgtggtgggcgctcatctttgcgtcaggccttgctttgatttttacgcttccagttagtgtcataactgccacaacaaatcagacaccagggttaaacatcatcacagagtacattatgggtctaatttaccctggtagaccaatagccaacgtctgcttcaaaacctatgggtatataagcatgactcaagctgtttcctttctcagcgatttcaagctaggtcactacatgaagattccaccaagatctatgtttgtagtgcagtgcataggtactctaataaatggaacactgaacactgcagtggcatggtggctgctgactggcattgagaacatatgccaggacgagctactccctccaaacagtccatggacatgtcctggcgatcgagttttctatgatgcatctgtcatttggggtttgattggacctgctcgaatctttggtcgacttggaaactacacagcactaaattggttcttccttggaggagtgctaggacctgttctcgtatgggggctacacagacttttccccaagcagaaatggattaaattaattaatcttcctgtacttttgggatcaacagctgcaatgccaccagctacaacagtaaacttcaattgctggattgtggttgcaataactttcaactacttcatctttaagttccacaaggtttggtggcagaggtacaactatgttctttctgctgccttggatgctggtttggctttcatgggagttcttttgtacttcagtctgacaatgaaggagatcagcctaaactggtggggtgctgctggcgagcactgtccccttgctacctgcccaactgccaaaggtgttattgttgatgggtgtcctgtttattagttcagttaagttgttactccaagctgcttcgtttgaaaggtcaagaaaaaaaaaaggacgaataaagtttttcaggtttg

SEQ ID NO: 216 - protein, 738 aa, Populus trichocarpa
MGSLEIEGKPQNPNMNENIEEDDGVSPIEEVRLTVPTRDDHTLPVWTFRMWFLGIASCIILSFLNTFFSYRTEPLTISMISVQVVTLPIGRFMAKTLPTAKFRVPGFGGREFSLNPGPFNVKEHVLISIFANVGSSTAYAVGIIDIIMAFYKRKISFLASWILVLTTQMLGYGWAGIMRKYVVDPAEMWWPLSLMQVSLFRALHEKDNSRMSRGKFFLIALICSFSWYVFPGYLFPAIGTISWVCWAFPKSVTAQQLGSGMRGLGIGAFGLDWSVIASFIGSPLITPFFAAVNVLVGYAAFMYVILPIAYWRFNLYNAKTFPIFSSHLFDTKGHVYNVSAIVDNNFELDVAAFQRQGNINLSVFFSLTYGIGFAAIMSTLTHVLVFNGKEIWQQFRASYKGKMDVHTRLMKRYEDIPGWWFHLTLVLSFLLSLVLCIVMKDQVQMPWWALIFASGLALIFTLPVSVITATTNQTPGLNIITEYIMGLIYPGRPIANVCFKTYGYISMTQAVSFLSDFKLGHYMKIPPRSMFVVQCIGTLINGTLNTAVAWWLLTGIENICQDELLPPNSPWTCPGDRVFYDASVIWGLIGPARIFGRLGNYTALNWFFLGGVLGPVLVWGLHRLFPKQKWIKLINLPVLLGSTAAMPPATTVNFNCWIVVAITFNYFIFKFHKVWWQRYNYVLSAALDAGLAFMGVLLYFSLTMKEISLNWWGAAGEHCPLATCPTAKGVIVDGCPVY

SEQ ID NO: 217 - DNA, 2393 bp, Populus trichocarpa
ggggaaaaaagagagcagaaacctcaaaccatggaagaaaccacacatcatggcatcagaactcctctgatgagcagggatgagaaagatgaagataatactgataacaacctcccatcatcatcaaaatctcaaacttcagagattaaccaagctcatgatgaagaaaactcacctgtcaagcaagttgctttaacagtacctacaacagatgacccttctctaccggtcctcactttcagaatgtgggtgttaggcactttatcatgtgtcctactatcatttctcaaccagttcttttggtacaggacagagcctttatctataacagctatatctgctcagattgctgtggtgcctcttggtcaattaatggctgcaaaaatcaccgaccgggtcttctttaaaggaactcgatgtgaattcaccttgaatccaggacctttcaatgttaaagaacatgttcttatcactatctttgccaattctggagcaggcagtgtttatgccattcatattgttactgttgttaaggcattttataagaaaaatattacattctttgtgtcattcattgttattattacaacccaggtgttggggtttggatgggctgggatatttagaaggtatctggtggaacccgctgctatgtggtggccagcaaatcttgttcaagtttcattgttcagggctctgcatgagaaagaagaacggtccaaaggtggcgtgacacgcacccaattcttcctcatagctttcacatgcagcttcgcttactatgtcttcccaggctacctctttgaaatgctaacttcactctcttggatatgctggatattcccaaaatcaatcctagcccaacaactaggttcaggtctttatgggcttggaattggtgcttttgggcttgattggtccactatctcttcctaccttggaagcccactcgcaagcccatggtttgccacagctaatgttgcggcaggttttgtttttgtcatgtacgttttgactcccctgtgctattggtttaatgtctacaaggccaaaaccttccctatcttctccgatgatctcttcacagcaacaggtcaagagtataatatctcagctattattgattccaatttccaccttgacctagcggcctacgaccgtgaaggacctctttaccttagcacattttttgctgtgacttatggtgttggttttgctgcactcactgctacgattgtgcatgttgcactctttcatggaagggaaatatgggagcaaagcatggcaagttttcaagagaaaacaatggacatacacacaagacacatgaggaagtacaatcaagttcccgagtggtggtttgtgtgcatccttttggttaatattgcactcaccatatttgcttgtgagtattacaaagatcagcttcagttgccttggtggggcgtcttactagcttgtggaattgccataactttcactcttccaatcgggatcatcactgccattactaatcagtcaccaggattgaacattatcacagagtatataattgggtacatctatcctggatatccagtagctaacatgtgctttaaggtttatgggtacataagcatgacacaggctataactttcctgcaagacttcaaacttggtcactacatgaaaatccctcctagaacaatgttcatggcacaagtcgtgggaaccattatagcctgcattacctacttgggcacggcatggtggttactggaaacaattactgatatttgtgactcaacagcgtctgatagcgtatggacatgtccaagtgaccatgtcttctacgatgcatctgtgatttggggtttgatcggaccgcgacgaatttttggaaacttgggtacatatgaagccgtgaattggttcttcctagttggagcaattgcgcctatccttgtatggctagctgctaaggcattcccacaacaagagtggattcgtctcattaacatgccagtgttaataggcgccacaggaatgatgcccccggcaactgcagtcaactacacaacttgggtccttgtcggtttcctatcaggctttgttgtgtataggtataagccggacttgtggcaaagatacaactatgtcctttctgggtcattagatgctggtcttgccttcatgggggtgctattatatttttgcttggggttggagaatattagcattaattggtggggaaacgaccttgatggatgtcccttggcttcctgcccaacagctaaaggagtctctgttgaaggctgcccggtttttacctagagatatatcagaagactgttagacacacaatcatgtttatgaggcttgaactagacagataggagcgggtatttcaactt

SEQ ID NO: 218 - protein, 760 aa, Populus trichocarpa
MEETTHHGIRTPLMSRDEKDEDNTDNNLPSSSKSQTSEINQAHDEENSPVKQVALTVPTTDDPSLPVLTFRMWVLGTLSCVLLSFLNQFFWYRTEPLSITAISAQIAVVPLGQLMAAKITDRVFFKGTRCEFTLNPGPFNVKEHVLITIFANSGAGSVYAIHIVTVVKAFYKKNITFFVSFIVIITTQVLGFGWAGIFRRYLVEPAAMWWPANLVQVSLFRALHEKEERSKGGVTRTQFFLIAFTCSFAYYVFPGYLFEMLTSLSWICWIFPKSILAQQLGSGLYGLGIGAFGLDWSTISSYLGSPLASPWFATANVAAGFVFVMYVLTPLCYWFNVYKAKTFPIFSDDLFTATGQEYNISAIIDSNFHLDLAAYDREGPLYLSTFFAVTYGVGFAALTATIVHVALFHGREIWEQSMASFQEKTMDIHTRHMRKYNQVPEWWFVCILLVNIALTIFACEYYKDQLQLPWWGVLLACGIAITFTLPIGIITAITNQSPGLNIITEYIIGYIYPGYPVANMCFKVYGYISMTQAITFLQDFKLGHYMKIPPRTMFMAQVVGTIIACITYLGTAWWLLETITDICDSTASDSVWTCPSDHVFYDASVIWGLIGPRRIFGNLGTYEAVNWFFLVGAIAPILVWLAAKAFPQQEWIRLINMPVLIGATGMMPPATAVNYTTWVLVGFLSGFVVYRYKPDLWQRYNYVLSGSLDAGLAFMGVLLYFCLGLENISINWWGNDLDGCPLASCPTAKGVSVEGCPVFT

SEQ ID NO: 219 - DNA, 2363 bp, Populus trichocarpa
aagaacaggaaactaataagagtggaggagatgactggtaccgaagaaatcacaactcctctaattcatcaacacagcaagcagacctcttccagtgttgccaattcctcctccacttcagcggactccaaggagaactctccaatcgagcaagttgcacttactgtaccaacaacagatgatcctactctccctgctgtcacctttcgcacatggacacttggctctctcgcctgcatcctcctctccttcctcaaccagttcttctggtaccgccgcgaaccactctccattacctccatctgtgcacagatcgcagtggtccctcttggccacctcatggcttccaccataaccaataagacattcttcataggaaaaaaatgggagttcacgttaaaccccggaccgtttaatgtgaaggagcatgtgttgatcaccatatttgctaactcgggtgctggaaatgtttatgccattcacattgttagtgctgtcaagttattttacaagaaggagttgacgttttttgtggcgttgctagtagttttaacgacgcagatgctggggttcggatgggctggtttgtttagaaggtacttggtagagcctgcttctatgtggtggccgcagaatcttgttcaagtttccctcttcagggcattacatgagaaagaggaaaggcataaagatggattaacaaggaatcagttcttcatcattgccttcatttgcagcttcgcctattatgcctttccgggctatcttttccccaagttaacctctatatcatggctttgttggatattcccttcttccatcctagctcatcagctaggatcaggactccatggtcttgggattggtgcctttggatttgattgggccaccatatcctcttaccttgggagtcccctagccagtccatggtttgcaactgccaatattgctgctggttttgtgcttcttatgtatgttattgctccaattgcatattggctcaatatttacgaggccaagaactttcccatattctcagatggcctgttcacctccactggccagagttacaatatctcagctatcatagacccaaaattccatattgacttagatgcatatgaccgtcaaggccctctctacctcagcactatcttcgctatgatttatggtctcaattttgcctgcctgacagccaccgtagttcatgttttcctcttccatggcagagatatatggcaactaagcaagtctgctttcagatacaagaaaatggatgtgcatacaaagctaatgaggaaatataatcaagtccctgaatggtggttcttgtgcatccttttcctaaacatagcagcaaccatatttacatgtgagtactacaatgagcaactccaattaccatggtggggtgtcttgctagcctgtggtattgccgtatttttcacccttcctgttggagtgatcactgctacaacaaataagacaccaggcctaaatgtgataacagaatatgtcattggctacttgtacccaggatttcctgttgctaacatatgctttaaagtgtacggatacattagcatgaaacaaggtatcaccttcttggaagatttcaagcttggtcattacatgaagattcctccgagagccatgttcatggcacaggtggttggtactataatatctgcgttggtacatctaggaactgcatggtggctgatggaaaccatcccaaatatatgtgatcgtgaattgctttcaccaggaagcccatggacttgcccaagcgaccatttgttctatgatgcatctgtgatctggggtcttattggccctcgcagagtttttggagatcttggccattattcagccaccaactggtttttcttaggcggggcaatagctcctatcctagtttggctggcacacaaggccttccctaacaaggattggattggacttatctccataccagtactcttaagtgctacactcaacatgctgccagctaccgccgtgaactacactacgtgggttgtagtcggattcgcttcgggctttattgcttataggtactatcgcgactggtggagccgccataactatgtgctgtcaggggcgttggatgctggattggccttcatggctgtattcctttacttgtgcttgggaatgtggcatgttagcctcgagtggtggggaagcgagtcggaaggatgcccgttagcttcttgcccaacagcaccgggggtttttggtaaaggttgcccaattctttaaggagaagtttaaaagaaagaagcgtgaagaagtagtggtctgcatgctttcatccacagcaaacttgcagaataaattaa

SEQ ID NO: 220 - protein, 750 aa, Populus trichocarpa
MTGTEEITTPLIHQHSKQTSSSVANSSSTSADSKENSPIEQVALTVPTTDDPTLPAVTFRTWTLGSLACILLSFLNQFFWYRREPLSITSICAQIAVVPLGHLMASTITNKTFFIGKKWEFTLNPGPFNVKEHVLITIFANSGAGNVYAIHIVSAVKLFYKKELTFFVALLVVLTTQMLGFGWAGLFRRYLVEPASMWWPQNLVQVSLFRALHEKEERHKDGLTRNQFFIIAFICSFAYYAFPGYLFPKLTSISWLCWIFPSSILAHQLGSGLHGLGIGAFGFDWATISSYLGSPLASPWFATANIAAGFVLLMYVIAPIAYWLNIYEAKNFPIFSDGLFTSTGQSYNISAIIDPKFHIDLDAYDRQGPLYLSTIFAMIYGLNFACLTATVVHVFLFHGRDIWQLSKSAFRYKKMDVHTKLMRKYNQVPEWWFLCILFLNIAATIFTCEYYNEQLQLPWWGVLLACGIAVFFTLPVGVITATTNKTPGLNVITEYVIGYLYPGFPVANICFKVYGYISMKQGITFLEDFKLGHYMKIPPRAMFMAQVVGTIISALVHLGTAWWLMETIPNICDRELLSPGSPWTCPSDHLFYDASVIWGLIGPRRVFGDLGHYSATNWFFLGGAIAPILVWLAHKAFPNKDWIGLISIPVLLSATLNMLPATAVNYTTWVVVGFASGFIAYRYYRDWWSRHNYVLSGALDAGLAFMAVFLYLCLGMWHVSLEWWGSESEGCPLASCPTAPGVFGKGCPIL

SEQ ID NO: 221 - DNA, 2369 bp, Populus trichocarpa
caccccttcccttccaccaccccactcaccatgggaagcctcgagatccaaacaccacatacctcctctagactcactgaccttgaaaaacccatcgccgatgctgtcgaagacgacgacgtatcccctatcgaggaggtccgactgaccgtggccaacacggacgacccaaccctacctgtatggaccttccggatgtggttcctaggcctgatttcatgcagccttctagctttcctcaaccaattcttttcttacagaaccgagccgcttattataagccagataaccgtccaaatagcttcactccctataggccgctccatggctgctgtgctaccaaaaaccaagttcaagattcctggttttgggtctagaactttctctctcaacccaggtccgtttaacatcaaagaacacgtactcatttctatatttgctaacgccggaagtgcatttggtagtggatctgcttatgctgttggtattgtcactatcatcaaagcattttacggaaggagtatttctttcttggctggttggcttctcatcaccactactcaggtgttaggatatggctgggcagggctactgaggaagtatgtggtggagccagcccatatgtggtggcctggcactctcgttcaggtctctcttttcagggctttgcatgagaaagatgatggtcaccgcatgacacgggcaaagttcttcgtaattgcactggcttgcagttttgtctggtatctattcccaggatacctatttacaacactctcaagcatttcatgggtctgctgggtatttccgaagtcagtaaccgcacagcaacttggttcaggcatgaggggccttggacttggagccattacacttgactggtctgttgtggcatccttcttgttcagccccctcattagtccattctttgccattgccaatgtccttgtgggatatgtattcataatttacgttgcaatgcccttagcttactggggcctcgacttgtacagtgcacgaaaatttcccattttctcctcacacctgtttacagcagagggtcgcaagtacaatataacagctattgttaataacaagtttcagctggatataccaaactatgaacagcaaggacgaattcatttaagcatgttttttgctctcacttatggcttcggttttgcaaccattgccgccacccttactcacgtggctttcttctatggaagggagattctccagaaatatcgtgcttcttacaagggcagggaggatatccatacaagattgatgaaaagatacaaggacataccttcctggtggttttacttgttgcttggtgtgacattaattgttgctcttgcactgtgcatcttcttgaatgatcaagttcagatgccatggtggggactcatcttcgcgagtgccatggcctttgtcttcacccttcccatcagcatcataactgccacaacaaaccagacaccagggctgaacataataacagagtatgtcatgggtatcatattaccggggagaccaatagccaatgtatgcttcaaaacctatggatatatgagcatggctcaggctgtttctttcctcaatgatttcaagctaggacattacatgaagatccctccaagatcgatgttcttggttcagttcataggaacaattcttgccggaaccatcaaccttgcagtagcctggtggctgctgaactccattgaaaacatatgccaggatgatctactacccgctaacagtccttggacatgcccaggtgaccgagtcttctttgatgcttctgtcatatggggtttggtgggaccaaagcggatctttggaacacttggaaactatcaggccatgaactggtttttccttggaggtgcactaggaccggttatagtttggctgctacacaaatcattccccaagcaatcttggattcccctaattaatcttccggtccttctaggagcaactgcaatgatgcctccagctacaccagtaaactacaacgcctggatcatagttggaacaattttcaatttcttcatcttccgttacaaaaagacgtggtggcagaggtacaattatgttctttcagctgcattggatgccggggtggctttcatggcagtgcttttgtacttctcagttggaatagaagataggactttgaattggtggggtacaaatggtgaacactgtgaattggcaacttgtccaacagccaagggcataatggttgatggctgtccagactttgttgccttctgatacaagtttctatttaagaggttacacaggatagaattagcaggtattgaacaacatgcatcaagccatagtggcaactc

SEQ ID NO: 222 - protein, 752 aa, Populus trichocarpa
MGSLEIQTPHTSSRLTDLEKPIADAVEDDDVSPIEEVRLTVANTDDPTLPVWTFRMWFLGLISCSLLAFLNQFFSYRTEPLIISQITVQIASLPIGRSMAAVLPKTKFKIPGFGSRTFSLNPGPFNIKEHVLISIFANAGSAFGSGSAYAVGIVTIIKAFYGRSISFLAGWLLITTTQVLGYGWAGLLRKYVVEPAHMWWPGTLVQVSLFRALHEKDDGHRMTRAKFFVIALACSFVWYLFPGYLFTTLSSISWVCWVFPKSVTAQQLGSGMRGLGLGAITLDWSVVASFLFSPLISPFFAIANVLVGYVFIIYVAMPLAYWGLDLYSARKFPIFSSHLFTAEGRKYNITAIVNNKFQLDIPNYEQQGRIHLSMFFALTYGFGFATIAATLTHVAFFYGREILQKYRASYKGREDIHTRLMKRYKDIPSWWFYLLLGVTLIVALALCIFLNDQVQMPWWGLIFASAMAFVFTLPISIITATTNQTPGLNIITEYVMGIILPGRPIANVCFKTYGYMSMAQAVSFLNDFKLGHYMKIPPRSMFLVQFIGTILAGTINLAVAWWLLNSIENICQDDLLPANSPWTCPGDRVFFDASVIWGLVGPKRIFGTLGNYQAMNWFFLGGALGPVIVWLLHKSFPKQSWIPLINLPVLLGATAMMPPATPVNYNAWIIVGTIFNFFIFRYKKTWWQRYNYVLSAALDAGVAFMAVLLYFSVGIEDRTLNWWGTNGEHCELATCPTAKGIMVDGCPDFVAF

SEQ ID NO: 223 - DNA, 2309 bp, Populus trichocarpa
aagttcttgacctagcttttgtatatgttcatggctgagatatctgagattaaggccatggaaattgaggctgatcatgaggaatgctcgataaagcaagtagatcttacagttccaaaaaccgatgatcccaccatgcctgttttgacattcagaatgtgggttcttggtctcggttcttgtatcattctatcctttgtaaaccagtttttctggtacaggtcgcagccattgaccgttacctctatttctgcacagattgctgtggtgcctttagggcatctaatggctaaaaaactgtctactcgtaagttttttgagggtacaagatgggagttcacattgaatcctggaccctttaatataaaggaacatgtgttgattacaatttttgcgaattctggtgccggaactgtctatgctgcccatattcttacctctgttaagatatattatcagaggaaacttactttcattccagccttatttattatgatcaccactcagatgctaggatttggttgggcaggaattttcaggaaatatttggttgagccaggggagatgtggtggccatctaatctggttcaagtctcattgttcagggctctacatgagagagagaaaaggccaaaaggcggtacaacccgtacccagtacttcctactagtcatgatctccgcttttgcatactatatcttgcctggctatcttttcactatgctatcatcattttcctggatctgttggcttggttccaagtctgttttggttcagcagctaggttcaggcttatcaggatttggaataggtgctgtaggatttgactgggcaacgatttcatcttatcttggaagcccacttgccagtccatggtttgctactgccaatgttgctgttggatttttcctgatcatgtatgtgatgacacccctctgttactggctcaatgtctacaatgccaagaacttccctttatattccaatcaactatacacagctacgggtcaggaatacaagatccttgagattatcaactcgaaatttcatctcgatcgggatgcttatgcagagcatggacctgtgcatatgagcactttctttgctatgacttatggcttgggttttgccacactttctgctactgttatgcacgtcttactctttagtggaagggacctatggaagcaaagcaagatggcctttggagccagaaggaaaatggatatacatacaaggctaatgaagagatataaatcagttcccatgtggtggttttttgtcattcttgttgcaaatattgctgctataatctttgcttgtgagtattacaatgctgcacttcagttgcgttggtggggtgttttactagcttgtgccatcgccttcttcttcaccctcccaattggtataattagtgccactacaaaccagcaaccgggattgaatgttatcacagaatatataatagggtacctgtatccagagcggcctgttgctaatatgtgcttcaaggtgtatggatatataagcatggctcaagctctaacattcctagcagattttaagctaggccactacatgaaaattccacctagatcaatgttcatggcgcaggtggtaggaacacttgtggctgtacttgtatacctaggaactgcctggtggatgatggatgctgttcccaatctttgcgctgcagacaacggcccatggagatgtccacaggacagtgtgttctttaatgcctctgtcatatgggggctggttgggcctcgcagaatctttggaaacctcggtgaatatggcaatgtcaactggttctttctgggaggtgctgtagctcctctcatagtctggatttttcacaaggcattcccaagcaagacatggatcggcctcattcacatgccaatcatgttaggtgccacagcaatgatgcctccagcttcttctgtgaactacaccagttggattatcgtaggattcctctcaggatatgttcttttcagacatcgaacagaatggtggaaacgttataattatgttctctctggcggtcttgatgccgggacagcctttatgactctgttgatcttttttggtcttggattctggaatgttggtctgctatggtggggaagcaacccggataaccaagaaggatgccccttggctagctgtccaactgccaaagggatctttgtcgatggatgcccagttttctgatgaaactctctatctttcttttactctcatttcactttctacagtaattttagttctgtaaatatatatccccagctgat

SEQ ID NO: 224 - protein, 768 aa, Populus trichocarpa
MGTVEVEAPPSKDLDIDEEELSPIEQVRLTVPNTDDPSLPVWTFRMWFLGILSCCLLSFLNQFFAYRTEPLIITQITVQVATLPIGRFLATVLPKTKFNILGFGSREFSFNPGPFNMKEHVLISIFANAGSAFGSGSAYAVGIVNIIKSKAFYGRNISFFSAWVLIITTQTKYENAIAKANKPTSDDVIVQVLGYGWAGLLRKYVVEPAHMWWPSTLVQISLFRTLHEKEDKNEHRISRVKFFVIAMTCSFLWYLLPGYLFQTLQSIAWICYAFPHSVTAQQIGSGMRGLGIGALTLDWSTVASYLYSPLLTPFFAIVNVFVGYALIMYVVIPISYWGLNVYDAKTFPIFSSHLFDARGASYNITEVVNDKFELDLAQYDKHGRVHLSTFFALTYGFGFATIAATLSHVALFYGREIYDRYRASYKGKEDIHTRLMKNYKDIPSWWFHGLLAMTLLVALFLCIFLKKEVQMPFWGLLFAAALAFIFSLPISIITATTNQTPGLNIITEYAMGIIYPGRPIANVCFKTYGYMSMAQAISFLSDFKLGHYMKIPPRSMFLVQFIGTIIAGTINLGVAWWLLNSVEHICQDNLLAANSPWTCPSDRVFFDASVIWGLVGPRRIFGSLGEYAALNWFFLGGLLGPFIVWLLHKAFPGQSWIPLINLPVLLGATASMPPATAINYNSWILVGTIFNFFIFRYRKAWWQRYNYVLSAALDAGVAFMAVLIYVTVGLENKNLYWWGSDPDVFPEHCSLATCPTAKGISVDGCPTF

SEQ ID NO: 225 - DNA, 2042 bp, Populus trichocarpa
tatagttttaggtagtgcgagcataggagcatggagcatgaagagactaatggtaatgggactcgtctttcgaccaaggccaagattcttgatgagatagaagaggtaaacgattcaccaatcgagcaagtcaagctcacagtgccgattacagatgatccaacattaccatgcttgacatttcgaacatgggttttggggatcgcatgttgtgctcttctggcatttgtgaatcagttctttggttaccgtcaaaatatactctatgtaacatcagtttcagctcagattgctttactgccaataggaaggcttatggaatcagttttaccgaacaaatttattcggtttccccgaactaaatgggcactttcattgaatccagggcctttcaacataaaagaacatgttctgatcaccatatttgcaaatgctggatcaaatactgtgtttgcagtgggaattatcaccatcgtgaaggcattttatcatggtcgtatagatgcaataccagctatgttgttaacgcagacgactcagttgttaggatatggatgggctggacttttcaggaagttccttgttgattccccttacatgtggtggccttccattctggttcaagtttccctcttcagggcattgcatgaagttgagatcaggcgtaagggaggcctaacgaggctgcagttcttcctcgttgtccttgtatcaagcttcgcatactatatagtccccggctatctcttccaatctgtaacggctctttcctttgtctgttggatatggaaggattcggtcactgcccaacaagttggctcaggtcttcatggcctaggcgttgactctttcgccattgattggtcaacggtgaccaactcatatggtgccaaacgttttccaattttctcttcccatgttttcgatgcttatggacaaccctacgatgtttcaagagttctaaatgagacaacctttgaattcaatcaaccaggatatgatggctacagcaaagtcaacctaagtatcttcttcgtttacacttatggtcttaactttgccatattggctgctgcattaactcatgtagcacttttctatggaagagaaatttggcatcaaacaaaagcagcatatcaagacaagtacgctgatgtccacaccagaataatgaagaagaattacgaagatgtccctcaatggtggttttactccctcttgatcatagtaattgcactaaccttgcttacttgtgagggctttggtaaacagttgcaacttccttactggggtgtcctactggcagttggcttggctctcatgttcacccttccagttggtgttcttgcagcaactacaaaccagcaaccagaactcaacgttatcaccgagctaataatcggttacatgtatccggggagactccttgcaaatgttactttcaagaactatggctacactagcatgtcacaagcaatctcgttcctctcagacttcaagctgggacattacatgaaaatcccccccaagtccatgtttgttgtccagatagtagggactttaatttcatcttcagtctacttcggcacgggttggtggctccttacctcggtggaaaacatctgcgatccatcaaaactgccagaaggaagccaatggacatgtcccggagtcgatgtattctacaatgcctctgtcatttggggtgtggttggaccgatgcgaatgttcggacgtcttggtttgtactctaagatgaactatttctttctcgttggccttcttgcgccggtgccagtgtggatatatattctctctcaagttcccggagaagacgtggatcaaatgaagaacattaatggaccaacctggtggggcttggaggtttctgatcattgtcccttggcaacttgtcctaccgctcctggcattcaggtggaggggtgtcctgtttttcaatgacaggttttgttatcagcatctctactggggttaaggttaatgatcatgaccttggatacataaaattgtaacttaattcc

SEQ ID NO: 226 - protein, 643 aa, Populus trichocarpa
MEHEETNGNGTRLSTKAKILDEIEEVNDSPIEQVKLTVPITDDPTLPCLTFRTWVLGIACCALLAFVNQFFGYRQNILYVTSVSAQIALLPIGRLMESVLPNKFIRFPRTKWALSLNPGPFNIKEHVLITIFANAGSNTVFAVGIITIVKAFYHGRIDAIPAMLLTQTTQLLGYGWAGLFRKFLVDSPYMWWPSILVQVSLFRALHEVEIRRKGGLTRLQFFLVVLVSSFAYYIVPGYLFQSVTALSFVCWIWKDSVTAQQVGSGLHGLGVDSFAIDWSTVTNSYGAKRFPIFSSHVFDAYGQPYDVSRVLNETTFEFNQPGYDGYSKVNLSIFFVYTYGLNFAILAAALTHVALFYGREIWHQTKAAYQDKYADVHTRIMKKNYEDVPQWWFYSLLIIVIALTLLTCEGFGKQLQLPYWGVLLAVGLALMFTLPVGVLAATTNQQPELNVITELIIGYMYPGRLLANVTFKNYGYTSMSQAISFLSDFKLGHYMKIPPKSMFVVQIVGTLISSSVYFGTGWWLLTSVENICDPSKLPEGSQWTCPGVDVFYNASVIWGVVGPMRMFGRLGLYSKMNYFFLVGLLAPVPVWIYILSQVPGEDVDQMKNINGPTWWGLEVSDHCPLATCPTAPGIQVEGCPVFQ

SEQ ID NO: 227 - DNA, 2345 bp, Populus trichocarpa
atctactgtttgtgtctttctagttcaagaatggcaactacagagagtaaggatgagaaacacacaaatggtttagggttagattcatcagcagaagaacaacatgaaagatgtcctgttgaggaagtggccttagttgtgcctgaaactgatgacccaacacttcctgtcctgactttccgtgcatggtttctgggtttaacttcatgcataatacttatctttttgaacaccttcttcacttaccgtacacagccactcactatctctgccattcttatgcaaattgctgtgttgcctatagggaagtttatggctaagactttgcccactagagattataggattttggggtggagttttagtttgaatccagggccttttaatatgaaagaacatgtgattatcactatctttgctaattgtggtgtgtcttttggtggtggtgatgcctactctattggtgccattactgttatgaaggcttattataagcagaatctgagtttcctttgtgggctgttcatagtcttgactactcagattttgggatatggatgggctgggatgctaaggagatacttggtttatcctgttgagatgtggtggccttcaaaccttgctcaggtttctctgttcagagcactgcatgaaaaggatccgaaaagtaaaggcctgactaggatgcaattcttcctcattgccatgacagcaagctttctctattatacagtccctggatacttgttcccaatcatgacgtttttctcatgggtgtgctgggtatggcctcatagtatcacggctcaacaagtagggtcaggttaccatggccttggtgtcggtgccttcactcttgattgggctgggatttcagcctaccatggcagtcctcttgtcgctccttggtcttccattgtcaatgttgcggttggatttatcatgttcatctacataatactccctttgtgttattggaaatataacacttttgatgcttggaagtttccaatattttctaatcagctattcacttctagcgggcaaaaatatgaaactacaaagatcttgaccccagattttcaacttaacatccctgcttatgatagttatagcaagctctatctgagccctctatttgccctgtcaattggatcaggatttgcaaggttcacagcaaccctcacacatgtggcgctgtttaacggaagggatatttggaggcaaagtagaagagcagtgcagaatgtgaaattggatgttcattcaaaattgatgaaagcttacaaagaagttcctgattggtggttttatattctcttaataggaagtgttgtcctctcgttgttaatgtcttttgtttggaaagaaactgtgcagctgcgatggtggggtatgctctttgcctttgccttggcttggcttgttacccttcctattggtgttattcaagcaactacgaatcagcaacctgggtatgacataatagcacagttcatgattggatatgttcttccaggaaaaccaattgcaaacctgcttttcaagatttatggacgaattagcacgatccatgctctttctttcttagctgaccttaaacttggacactatatgaaaattccaccacggtgcatgtatgtagctcagctagtggggacctttgttgctggtacactcaatcttgcagttgcgtggtggatgttggagaacattgaaaatatctgtgatactgatgtacttgattctagtagtccatggacgtgtcctaagtaccgagtcacgtttgatgcttctgtaatctggggcctcattggaccaaggaggctctttggacctggtggcctctacaggaacttggtatggctgttcctcattggagctttcttaccggttcctttctgggtactgagcaaaatgttccctgaaaagaaatggattgcattgataaatataccagtaatatcttatggttttgccggaatgccacctgcaactcccaccaacatcgcaagctggcttgtcactggaactatattcaactactttgtctttcgatatcgcaagcgctggtggcagaagtataactatgtcctatctgcagcattggatgctgggacagctttcatgggtgttttattgttcttcgctgtgcagaattcaggcaaagaattgaaatggtggggtacggaagttgatcactgtcctttggcttcatgtccaacagcaccggggattgtagttaaaggatgtccagtcttttaaatagccacgcagccatttaagagatggataagaaattgggagcagtgatagagaacaattaagaatccgtttttattttc

SEQ ID NO: 228 - protein, 744 aa, Populus trichocarpa
MATTESKDEKHTNGLGLDSSAEEQHERCPVEEVALVVPETDDPTLPVLTFRAWFLGLTSCIILIFLNTFFTYRTQPLTISAILMQIAVLPIGKFMAKTLPTRDYRILGWSFSLNPGPFNMKEHVIITIFANCGVSFGGGDAYSIGAITVMKAYYKQNLSFLCGLFIVLTTQILGYGWAGMLRRYLVYPVEMWWPSNLAQVSLFRALHEKDPKSKGLTRMQFFLIAMTASFLYYTVPGYLFPIMTFFSWVCWVWPHSITAQQVGSGYHGLGVGAFTLDWAGISAYHGSPLVAPWSSIVNVAVGFIMFIYIILPLCYWKYNTFDAWKFPIFSNQLFTSSGQKYETTKILTPDFQLNIPAYDSYSKLYLSPLFALSIGSGFARFTATLTHVALFNGRDIWRQSRRAVQNVKLDVHSKLMKAYKEVPDWWFYILLIGSVVLSLLMSFVWKETVQLRWWGMLFAFALAWLVTLPIGVIQATTNQQPGYDIIAQFMIGYVLPGKPIANLLFKIYGRISTIHALSFLADLKLGHYMKIPPRCMYVAQLVGTFVAGTLNLAVAWWMLENIENICDTDVLDSSSPWTCPKYRVTFDASVIWGLIGPRRLFGPGGLYRNLVWLFLIGAFLPVPFWVLSKMFPEKKWIALINIPVISYGFAGMPPATPTNIASWLVTGTIFNYFVFRYRKRWWQKYNYVLSAALDAGTAFMGVLLFFAVQNSGKELKWWGTEVDHCPLASCPTAPGIVVKGCPVF

SEQ ID NO: 229 - DNA, 2417 bp, Populus trichocarpa
cctcagctctcaatctctgtctcacactcaatgggaactgtagaggtagaggcaccgccaagcaaagaccttgacatagacgaagaagagctctctccaatagaacaagtccgtttaacagtacccaacacggatgacccgtctctcccagtatggactttcaggatgtggttcttgggcattctctcttgctgtctcctttctttcttgaaccaattcttcgcttatcgaactgagcctctcatcatcacccagattaccgtccaggtggcaactctccccatcggacggtttttagctactgtgctgcctaaaaccaagtttaacattcttggttttgggagtagagagttctcttttaaccctgggccgtttaacatgaaagagcatgttttgatttcgatatttgctaatgctggtagtgcttttgggtctggttcagcttatgctgtcggtattgttaacattatcaagtccaaggcgttttacggaaggaacatctcctttttctctgcttgggttctcatcatcaccacacagacaaaatatgaaaatgctattgcaaaagctaacaaaccgacaagcgatgatgtaattgtgcaggttttagggtatggttgggctgggctattgaggaaatacgtggtggaaccagctcatatgtggtggcctagtactcttgttcaaatctctcttttcaggacattgcatgaaaaggaagacaaaaacgagcaccgtatctcacgagtgaaattctttgtcattgcaatgacatgtagctttctctggtacttgttgccagggtacctcttccaaacattacaaagcattgcttggatttgctatgcttttccacattcagtcactgcccaacagatagggtctggcatgagaggtctaggaatcggagccttgacattggactggtcaacagtagcttcgtacttgtatagccctctgcttactcccttcttcgctattgtaaatgtcttcgtagggtatgcactgataatgtacgtcgtaattccaatatcatactggggactgaatgtatacgatgccaagacatttcccattttttcatcgcacctgttcgatgcacgaggtgcatcgtacaacattactgaggttgttaacgacaagttcgagttagatttggcacagtatgataagcatgggagggttcatttgagtacattcttcgctctcacctatggatttggatttgccactattgcagccactctttctcacgtggctttgttctatggaagggaaatttatgatcgttaccgggcctcttataagggaaaggaggatattcacacaagactaatgaagaactacaaggacataccttcctggtggtttcatgggcttctagccatgacattactagtcgcccttttcctctgcatcttcttgaaaaaggaagttcaaatgccattttggggacttctgttcgcagctgcccttgccttcatattctcccttcctatcagcattattactgccaccacaaatcagacaccagggctgaatatcattactgagtatgcaatgggaatcatatatcctgggagacctatagccaatgtttgctttaaaacctatggctatatgagcatggctcaggcaatttcctttcttagtgacttcaagctaggacattatatgaagattcctccaaggtccatgttcctggttcagttcattggaaccatcatagctggaacaatcaaccttggggtggcatggtggcttctgaatagtgttgaacatatatgccaagataacctccttgcagcaaatagtccttggacttgccctagtgaccgtgtgttcttcgacgcatctgtcatctggggtttggttggacctaggagaatctttggctccctcggagaatacgcggccctcaactggttcttcttgggaggactgttgggaccctttattgtatggctactccacaaggcattccctgggcaatcttggataccacttattaatctaccagtgctcctgggagcaacagcgtctatgccaccagcaacagcaataaactacaactcatggattttagttggaacaatcttcaattttttcattttcaggtacagaaaggcctggtggcagagatataactatgttctatcagcagctcttgatgcaggtgttgccttcatggcagttcttatttatgtgacggtagggctcgaaaataagaacttgtactggtggggttctgatcctgatgtttttccggagcactgttcactagcaacttgccccaccgcaaagggtatctcggttgatgggtgtccaacattctagctctcatggtagtctcaagttttttaattctcaacgaacgcgcaagtttcccaagttttcagcattaatgtgtgtcttta

SEQ ID NO: 230 - protein, 734 aa, Populus trichocarpa
MFMAEISEIKAMEIEADHEECSIKQVDLTVPKTDDPTMPVLTFRMWVLGLGSCIILSFVNQFFWYRSQPLTVTSISAQIAVVPLGHLMAKKLSTRKFFEGTRWEFTLNPGPFNIKEHVLITIFANSGAGTVYAAHILTSVKIYYQRKLTFIPALFIMITTQMLGFGWAGIFRKYLVEPGEMWWPSNLVQVSLFRALHEREKRPKGGTTRTQYFLLVMISAFAYYILPGYLFTMLSSFSWICWLGSKSVLVQQLGSGLSGFGIGAVGFDWATISSYLGSPLASPWFATANVAVGFFLIMYVMTPLCYWLNVYNAKNFPLYSNQLYTATGQEYKILEIINSKFHLDRDAYAEHGPVHMSTFFAMTYGLGFATLSATVMHVLLFSGRDLWKQSKMAFGARRKMDIHTRLMKRYKSVPMWWFFVILVANIAAIIFACEYYNAALQLRWWGVLLACAIAFFFTLPIGIISATTNQQPGLNVITEYIIGYLYPERPVANMCFKVYGYISMAQALTFLADFKLGHYMKIPPRSMFMAQVVGTLVAVLVYLGTAWWMMDAVPNLCAADNGPWRCPQDSVFFNASVIWGLVGPRRIFGNLGEYGNVNWFFLGGAVAPLIVWIFHKAFPSKTWIGLIHMPIMLGATAMMPPASSVNYTSWIIVGFLSGYVLFRHRTEWWKRYNYVLSGGLDAGTAFMTLLIFFGLGFWNVGLLWWGSNPDNQEGCPLASCPTAKGIFVDGCPVF

SEQ ID NO: 231 - DNA, 2306 bp, Populus trichocarpa
gggcattcactatctgcaaatcttgagatcatggctggggcaaatgaggttcaggccatggaaatagaggatgaagaggagtgtccagtaaagcaagtagatcttactgttctgaaaactgatgaccccaccttgcctgttttgacgttcagaatgtgggttcttggtcttggttcttgtgtcctcttgtcctttgtaaaccagtttttctggtacaggacacaaccgatgttcatttcgtctatttctgcacagattgctgtggtgccattggggcatctaatggctaaaaaactgaccactcgcaagttctttgagggtacaagctgggagtttaccatgaatcctggaccttttaatattaaggaacatgtgctgatcacaatatttgccaattcgggtgctggaactgtttatgctacgcatattctcactgctgttaagctatattacaagaggaaactgacttttgttcccgccttgtttgttatgattactactcaggtactaggatttggttgggctggtcttttccggaaatatttggtggagccaggggaaatgtggtggccatctaatctggttcaagtgtctttgttcagggcactacatgagaaagagaaaagactgaaaggctacacaagtcgtacccagttctttctcctagtcataatttgcagctttgcatactatgtcttgcctggttatcttttcaccatgttaacatccttctcttgggtctgttggcttggttccaagtctgttctggttcagcaactaggttcaggcttgcaaggacttggaataggcgctgtagggtttgattgggctacagtttctgcttatcttggaagtccactagctagtccatggtttgctactgccaatgttgcagttggattttccctaataatgtatgtgatgacacccatctgttactggctcaatgtctacaatgccaagaactttccattatattcaaatgagctttttacagaaaagggtgaggagtacgacatccttaacatcatcaattcaaagtttcacctggatcgggatgcttatgcaaagtttgggccaatacacatgagcaccttcttttctatgacttatggccttggatttgccacactttctgctactgttatgcatgtcctactctttaatggaagtgacctatggaagcaaagcaaaagggcctttgggggcagaaggaaaattgatatacatacaaggctcatgaagaaatacaaatcagttcccacatggtggttctacatcatccttgtcataaacattgctgctataatctttgcttgtgagcattacaatgaatcacttcaattgccttggtggggtgttctgctagcttgtgccatcgcatttttcttcactctgccaatcggtatcatcagtgccaccacaaatcagcaaccaggtcttaacgttatcacggaatacattatagggtacatgtatccagagcggccggttgctaatatgtgcttcaaggtgtatggatatataagcatgactcaagctctaacgtttctagcagactttaagctagggcactacatgaaaattccacctagatcaatgttcatggcacaggtggtaggaacacttgtggctgtactcgtatacctaggaactgcctggtggatgatggatgccattcccaatctttgtagtcaagacaacggcccatggaaatgcccgatggacagggtgttttttgatgcttctgtcatatgggggctggttggaccgcgcagaatctttggcaaccttggcgaatatggaggtgtcaattggttctttctcggtggggctgtagctcctctcatagtctggattttccataaagcattcccaagaaaggaatggatcagcctcattcacatgccagtcctgttaggtgcaacatcaatgatgcctccagcttctgctgtgaactacaccagttggattgttgttggattcctctctggatatgttctgttcagatatcgaacagaatggtggaaacgttataattacgtgctctctggtggccttgatgccgggacagcctttatgactctgttgatctttttcgctctcggatactgggatgttgacctgacatggtggggaagcaattcgagcaacccagaaggatgcctcttggctagctgtccaactgccaaagggatcattgtagatggctgcccagttctctgatcaaactgtatatttttactctccttttgccccgttttcgaaacaataatatttacttctgtcaatacatacagacagct

SEQ ID NO: 232 - protein, 731 aa, Populus trichocarpa
MAGANEVQAMEIEDEEECPVKQVDLTVLKTDDPTLPVLTFRMWVLGLGSCVLLSFVNQFFWYRTQPMFISSISAQIAVVPLGHLMAKKLTTRKFFEGTSWEFTMNPGPFNIKEHVLITIFANSGAGTVYATHILTAVKLYYKRKLTFVPALFVMITTQVLGFGWAGLFRKYLVEPGEMWWPSNLVQVSLFRALHEKEKRLKGYTSRTQFFLLVIICSFAYYVLPGYLFTMLTSFSWVCWLGSKSVLVQQLGSGLQGLGIGAVGFDWATVSAYLGSPLASPWFATANVAVGFSLIMYVMTPICYWLNVYNAKNFPLYSNELFTEKGEEYDILNIINSKFHLDRDAYAKFGPIHMSTFFSMTYGLGFATLSATVMHVLLFNGSDLWKQSKRAFGGRRKIDIHTRLMKKYKSVPTWWFYIILVINIAAIIFACEHYNESLQLPWWGVLLACAIAFFFTLPIGIISATTNQQPGLNVITEYIIGYMYPERPVANMCFKVYGYISMTQALTFLADFKLGHYMKIPPRSMFMAQVVGTLVAVLVYLGTAWWMMDAIPNLCSQDNGPWKCPMDRVFFDASVIWGLVGPRRIFGNLGEYGGVNWFFLGGAVAPLIVWIFHKAFPRKEWISLIHMPVLLGATSMMPPASAVNYTSWIVVGFLSGYVLFRYRTEWWKRYNYVLSGGLDAGTAFMTLLIFFALGYWDVDLTWWGSNSSNPEGCLLASCPTAKGIIVDGCPVL

SEQ ID NO: 233 - DNA, 2342 bp, Populus trichocarpa
tgttacagtttgtgtctttattggtcagcaatggcaagtcaagagagtactgatggaagacacacaaatgggttgcggttagattcatctgcagaacatcatgaaagatgtcctgttgaagaagtggctttagttgtgcctgaaactgacgatccaacacttcctgtcttgacttttcgtgcatggtttctgggtttaacttcatgcgtaatacttatcttcttgaacacttttttcacttaccgtacacagccacttactatctctgccattcttatgcaaattgctgtgttgcctgttggcaagttcatggctaagactttgcctacgaaagattataggattttggggtggagttttagtttgaatccagggccttttaatatgaaagaacatgtgattatcactatttttgcgaactgtggtgtctcttatggtggtggtgatgcttattctattggtgccattactgttatgaaggcttattataggcagagtttgagttttctttgtgggctgctcatagtcttgactactcagatattgggatatggatgggctgggatgctaaggagatacctggtttatcctgtagagatgtggtggccttccaatctagctcaggtttctctgttcagagcactgcatgaaaaggagccgaaaagtaaaggcatgacaaggatgcgattcttcctcattgccatgacagcaagctttttctattacgcagtccctggttacttgttcccaatcttgacattcttctcgtgggtctgctgggcatggcctcacaacatgacagctcaacaaatagggtcaggataccatggccttggtgttggtgccttcactcttgattgggctgggatttcggcctaccatggcagcccccttgttgctccttggtcttccattgtcaatgttgcggttggctttattatgttcatctacgttatagtccctgtgtgttattggaagtataacacttttgatgctcggaagtttccaatattttctaatcagctgttcacttctagcgggcaaaaatatgatactacaaagatcctgaccccagaatttcaacttaacattcctgcttatgatagctacagcaagctttatcttagtcctctatttgccctgtcgattggatcaggatttgcaaggttcacggcaactctcacccatgtggcactgtttaatggaagggatatttggaagcaaagtaggaaagcaatgcagaatgtgaaattggatgttcatgcaaaattgatgaaagcttacaaagaagttcccgactggtggttctatattctgttagcagggagtgttttcctctcattgttaatgtcttttgtttggaaagaaactgtgcagctgccatggtggggtatgctctttgcctttggcttggcttggcttgttacccttcctattggggttattcaagcaactaccaaccagcaacctggctacgacataatagcacagttcatgattggatatgtcctaccaggacaaccaattgcaaacctgcttttcaagatttatggacgaatcagcacggtccatgctctttctttcttatctgaccttaaacttggacactacatgaaaattccaccacggtgcatgtatgtagctcagcttgtgggaactttagttgccggtacagtcaatcttgcagttgcgtggtggatgttggagaacattgaaaatatctgtgatgttgattcgcaagattccaacagtccttggacgtgtcctaagtaccgagttacttttgatgcttctgtaatctggggcctcattggaccaaaaaggctcttcggacctggtggcctctacaggaacttggtatggctgttcctcattggagctttcttgccggtgcctttttgggtactgagcaaaatgttccctgaaaagaaatggattgcattgataaacattccagttatatcttatggttttgccggaatgccaccctctactcccaccaacattgcaagctggcttatcactggaaccatcttcaactactttgtcttccgatatcgcaagcgctggtggcagaagtataattatgttctgtctgcggcattggatgctgggacagctttcatgggtgttctattgttctttgctgtgcagaacacagacaaaaaattgagttggtggggtgcagaacttgatcactgtcctttggctacatgtccaacagcgccaggaattgtggttaagggatgccctgtcttttgaatagttatgcagccattatagttaaagccaaagctggtttagtgtagttttaagagatggagaagaaattggaaacagtg

SEQ ID NO: 234 - protein, 743 aa, Populus trichocarpa
MASQESTDGRHTNGLRLDSSAEHHERCPVEEVALVVPETDDPTLPVLTFRAWFLGLTSCVILIFLNTFFTYRTQPLTISAILMQIAVLPVGKFMAKTLPTKDYRILGWSFSLNPGPFNMKEHVIITIFANCGVSYGGGDAYSIGAITVMKAYYRQSLSFLCGLLIVLTTQILGYGWAGMLRRYLVYPVEMWWPSNLAQVSLFRALHEKEPKSKGMTRMRFFLIAMTASFFYYAVPGYLFPILTFFSWVCWAWPHNMTAQQIGSGYHGLGVGAFTLDWAGISAYHGSPLVAPWSSIVNVAVGFIMFIYVIVPVCYWKYNTFDARKFPIFSNQLFTSSGQKYDTTKILTPEFQLNIPAYDSYSKLYLSPLFALSIGSGFARFTATLTHVALFNGRDIWKQSRKAMQNVKLDVHAKLMKAYKEVPDWWFYILLAGSVFLSLLMSFVWKETVQLPWWGMLFAFGLAWLVTLPIGVIQATTNQQPGYDIIAQFMIGYVLPGQPIANLLFKIYGRISTVHALSFLSDLKLGHYMKIPPRCMYVAQLVGTLVAGTVNLAVAWWMLENIENICDVDSQDSNSPWTCPKYRVTFDASVIWGLIGPKRLFGPGGLYRNLVWLFLIGAFLPVPFWVLSKMFPEKKWIALINIPVISYGFAGMPPSTPTNIASWLITGTIFNYFVFRYRKRWWQKYNYVLSAALDAGTAFMGVLLFFAVQNTDKKLSWWGAELDHCPLATCPTAPGIVVKGCPVF

SEQ ID NO: 235 - DNA, 2357 bp, Populus trichocarpa
atccagtttaggtagttcaggcatagaagaatggagcacgcagagactaatggtaaagggattcctctttcaaacaaggtcgaggtgcttgatgagaaagaagaggcaaacgattcgccaatcgagcaagttaggctcacagttccgattacagacgatccaacattaccatgcttgacttttcgaacatgggtcttggggatcacaagttgtgctcttctggcatttgccaatcagttcttcggttaccgtcaaaatatactctctgtaacatcagtttcagcccagattgtagtgctgccagtagggaggctcatggcagcaattttaccaaacaaagttatccgttttccaagaacgaaatggtcattttctttgaatccagggcctttcaacttaaaagaacatgtcctgatcacaatatttgcaaattctggatcaaatcctgtgtatgcagtgggtattatcaccattgtcaaggcattttatcatggtaacatagacgcagtaccggctatgttattgtcgcagacgacgcagctgttaggatatggatgggctggaatcttcaggaagttccttgttgattccccttatatgtggtggccttccaatctggttcaagtttccctctttagggcattgcatgaagttgagatcaggcgtaagagaggcctgacaaggctgcagttcttcctcgtggtccttatatcaagcttcgcgtactatatagttcccggctatctcttccaatctataactgctctttcctttgtttgttggatatggaaagattcagtcactgcccagcaaattggttctggtcttcatggccttggtgttggctcgttcgcctttgattggtcaactgtagctggttttttgggatctccattggccactccgggatttgctattatcaacatattatttggttacatcataattctctacatcataatccccatatcttactggacaaactcatacaatgccaaacgttttcccattttctcttcacatgttttcgatgctaatggaaaaccctacgatgtttcaacagttctaaatgagacaacctttgaattcaatagagcagggtatgatggctacagcaaagtcaacctaagtatcttctttgtttacacttatggtctaagctttgccatattggctgctacattaactcatgtagcacttttccacggaagggagatttggtatcaaacaaaagaaacattgaaagacaagtatgctgatgtccacactaggataatgaagagaaattatgaggctgttcctcaatggtggtttcatataatcttgattgtagtaactggactagccctgcttacttgtgaaggctttggtagacagttacaacttccttactggggtgtcctgctagcgattggcttggctttcattttcactcttcccattggtgttattacagcaactacgaaccagcaaccgggactcaacgttatcactgagctaataatcggttacatgtatccggggagacctcttgcaaatattactttcaagacctatggctacattagcatgtctcaagcaatcatgttcctctcagacttcaagctgggacattacatgaaaattcccccaaagtccatgtttgttgtccagttagtagggactgtaattgcatcttcagtttacttcggcacggcctggtggctccttacctcggtggaaaacatctgcaatccatcaagattgccagaaggaagtccatggacatgtccaggagacgatgttttctacaatgcctccatcatttggggcgtggttggaccactgcgaatgttcggacgtcttggtttgtactcgaagatgaactatttcttcctcattggccttctcgcgccggtgccagtgtggatactctctcgcatgttccctgagaagaaatggatcaaactcattaatgtgcctattatcataggaggcacaggaggcatgccatcagccagggctgtgaactatatgtgctggtttgctgtaggcattttcttcaattttgttgtctacaagagatatagaggatggtgggttaggcacaactacatcctatcagcagggttagatgctggagttgctttcctagccattttactctattttacactacaaatcaaggacattaatggaccaacctggtggggcttggagctgagtgatcattgtcctctggcaacttgtcctactgcccctggctttcaggttgagggatgccctgttttccactaacagctgctttcatcagaatttctacctgggttaaggaacaatatgtcctttgacacgcgaagttgtaacttaattccatt

SEQ ID NO: 236 - protein, 748 aa, Populus trichocarpa
MEHAETNGKGIPLSNKVEVLDEKEEANDSPIEQVRLTVPITDDPTLPCLTFRTWVLGITSCALLAFANQFFGYRQNILSVTSVSAQIVVLPVGRLMAAILPNKVIRFPRTKWSFSLNPGPFNLKEHVLITIFANSGSNPVYAVGIITIVKAFYHGNIDAVPAMLLSQTTQLLGYGWAGIFRKFLVDSPYMWWPSNLVQVSLFRALHEVEIRRKRGLTRLQFFLVVLISSFAYYIVPGYLFQSITALSFVCWIWKDSVTAQQIGSGLHGLGVGSFAFDWSTVAGFLGSPLATPGFAIINILFGYIIILYIIIPISYWTNSYNAKRFPIFSSHVFDANGKPYDVSTVLNETTFEFNRAGYDGYSKVNLSIFFVYTYGLSFAILAATLTHVALFHGREIWYQTKETLKDKYADVHTRIMKRNYEAVPQWWFHIILIVVTGLALLTCEGFGRQLQLPYWGVLLAIGLAFIFTLPIGVITATTNQQPGLNVITELIIGYMYPGRPLANITFKTYGYISMSQAIMFLSDFKLGHYMKIPPKSMFVVQLVGTVIASSVYFGTAWWLLTSVENICNPSRLPEGSPWTCPGDDVFYNASIIWGVVGPLRMFGRLGLYSKMNYFFLIGLLAPVPVWILSRMFPEKKWIKLINVPIIIGGTGGMPSARAVNYMCWFAVGIFFNFVVYKRYRGWWVRHNYILSAGLDAGVAFLAILLYFTLQIKDINGPTWWGLELSDHCPLATCPTAPGFQVEGCPVFH

SEQ ID NO: 237 - DNA, 2235 bp, Vitis vinifera
atggggaccttagaagcacaaacaccctactccaccgctgaaagatccatcagtgccaccgacggcgatgaagacgagctctcgcccatcgaggaagtccggctaaccgtgaccaacaccgacgaccccagcctccccgtgtggacctttagaatgtggttcatgggcttgttctcatgcgcactcctctcatttctcgaccaattcttcgcgtacaggactgagccgctcatcataactcagatcaccgtccaagttgccaccctccccattggccacttcatggcggcggtgctacccaccaccaggttccggattccagggttcgggtcacgatcattttcgctcaaccctggtccgtttaacatgaaggaacatgtcctcatttccatctttgctaacgccggaagtgcttttggaagtggctctgcttatgctgttggtatagtcaccataatcaaagccttttatcaacgaaagatctcgtttttgtctggttggcttctcataatcactactcaggtattgggatatggatgggctgggctgctgaggaagtatgtggtggagccggcccatatgtggtggcccagctccttggttcaagtctctcttttccgggcattacatgagaaagaggagcaacgcatgacaagagcaaagttcttcgtgattgcactaatttgcagtttttcctggtacctgatcccaggatacctcttctcaacactcacaagtatatcatgggtctgctgggcattccccaagtcagttacagcccagcaattaggctcaggcatgaggggccttggacttggagccctaaccctcgactggactgttgtggcctctttcttattcagccccctcgtttcccctttctttgccattctcaatatctttgtgggctatgtcttgttagtatatgctgtcattcccttggcttactggggatttgatatgtacaatgcacatagatttcccatattctcctctcacttgttcacatcgcaaggtcagctatatgacataggagctattgtaaatgacaagtttgagataaatcgacagaagtatgaggagcagggacgaattaatctaagcatattttttgctctcagttatggctttggttttgcaactatagcatccacccttactcatgtcgctctcttctatggaagcgaaatttgccagcggtatcgtgcttcttacaagggcaaggaggatatccatacaagattgatgaggagatatgcagacataccttcctggtggttctatttgttacttgtagtgacaatcgcagtctcccttgcactctgcatcttcttgaatgatgaggttcagatgccatggtggggactcatctttgctgctgccatggcatttatttttacccttccaatcagcattataactgctacaacaaaccagacaccaggactgaatataatcacagagtacgtcatgggtgtcatattaccaggaagaccgatagccaatgtgtgcttcaaaacctatggttatatgagcatggctcaggctgtctccttcctgaatgatttcaagctaggacactacatgaagatccctccaagatcgatgttcttagttcagtttataggaacgatcctggcaggaacaatcaacattgcagtggcatggtggttgctgactactattaagaacatatgccaggatgaactccttcctcctgacagtccttggacatgccctggtgaccgggtcttctttgatgcatctgttatatggggtttggtaggacctaaacgaatctttggaagtcttggaaactatccttccatgaattggttctttcttggaggtgcattgggaccggttgtggtttgggtatttcataaggcattcccaaagcaatcttggattcccctaattaaccttccagtccttttgggagcaacaagtatgatgccaccggcaacctcactaaattacaattcttggattcttgttggaacaattttcaacttttttgtcttccgttatcgaaagcagtggtggcagaggtacaattatatcctttcagctgctatggatgcgggggttgctttcatggcagtgctattgtacttctcactgggcattgaggagaaaggtctcacttggtggggtacagatggtgaacactgtaagctggcaacttgtcctacagccaaaggcattgtggttgatggctgtccagtgaactaa

SEQ ID NO: 238 - protein, 744 aa, Vitis vinifera
MGTLEAQTPYSTAERSISATDGDEDELSPIEEVRLTVTNTDDPSLPVWTFRMWFMGLFSCALLSFLDQFFAYRTEPLIITQITVQVATLPIGHFMAAVLPTTRFRIPGFGSRSFSLNPGPFNMKEHVLISIFANAGSAFGSGSAYAVGIVTIIKAFYQRKISFLSGWLLIITTQVLGYGWAGLLRKYVVEPAHMWWPSSLVQVSLFRALHEKEEQRMTRAKFFVIALICSFSWYLIPGYLFSTLTSISWVCWAFPKSVTAQQLGSGMRGLGLGALTLDWTVVASFLFSPLVSPFFAILNIFVGYVLLVYAVIPLAYWGFDMYNAHRFPIFSSHLFTSQGQLYDIGAIVNDKFEINRQKYEEQGRINLSIFFALSYGFGFATIASTLTHVALFYGSEICQRYRASYKGKEDIHTRLMRRYADIPSWWFYLLLVVTIAVSLALCIFLNDEVQMPWWGLIFAAAMAFIFTLPISIITATTNQTPGLNIITEYVMGVILPGRPIANVCFKTYGYMSMAQAVSFLNDFKLGHYMKIPPRSMFLVQFIGTILAGTINIAVAWWLLTTIKNICQDELLPPDSPWTCPGDRVFFDASVIWGLVGPKRIFGSLGNYPSMNWFFLGGALGPVVVWVFHKAFPKQSWIPLINLPVLLGATSMMPPATSLNYNSWILVGTIFNFFVFRYRKQWWQRYNYILSAAMDAGVAFMAVLLYFSLGIEEKGLTWWGTDGEHCKLATCPTAKGIVVDGCPVN

SEQ ID NO: 239 - DNA, 2274 bp, Vitis vinifera
atgggaacggtggaaatagaggcaccaataatcaagaccaggacagatgaagatgtgaaggaagacgaactctctccgatagaagaagtccgattgacagtacccaacgacgatgacccatctctacctgtatggacatttcgaatgtggttcctgggactcatctcctgtgccctcctctcattcctcaaccagttcttctcctaccgaaaagaacccttggtaataagccagatcaccgtccaggtggccacgctcccaatcggacgcttcatggcctcagtcctcccagatattaagttccacgtccacattccattcttcggaaaaaaagagctctctctcaacccgggtccttttaacatgaaggagcatgtattgatctccatatttgccaatgctggaagtgcttttggcggtggatcggcttatgctgttggtattgttaccatcattaaggctttttataagagaaatatttcctacttagctggttggatccttatcatcaccactcaggttctgggttacggttgggctgggctcttaagaaagtatgtggttgagcctgcacacatgtggtggcccagcacccttgttcagatctccctcttccgaacattgcatggaaaagaaaatgaagttgatgagcaagaaacggaggtgcagcagcgcacgtcaagatcaaaatttttccttatcgcaatgttgtgtagcttcctctggtacatggttcccggttacctcttccagtccctacaaagcatcgcatgggtctgctgggcctttcctaactcggtcaccgcccatcaaattggttctggttttagaggacttggcttcggagccctgaccctggactggacggtggtagcttcgttcttgttcagccctttggtctgtccgttttttgccattgtcaatgtcttcataggctatgtcttgattatctacattgtaatgcccatttcctactggggcctcaatgtgtacaacgccagaaccttccccatcttctcttcccacttgttcactgcccagggtcagtcatataacatcacggccattgttaatgataaattcgagattgatctggcacagtatgacatacaaggaaggctcaatttgagtttattcttcgctctcgcatatggctttggatttgcaactattgcatccacactgtctcatgtggggttgttctatggaagggagatttacactcgattccgggcttctcaagatgagaaggtggatattcacacaaaattgatgaagaaatacgaggacataccttcttggtggtttcacttgcttcttactgggtcggtactggtctcccttgcactctgcatcttcctgaaagatgaggtccaaatgccgtggtggggacttatatttgcagctggccttgccttcgtattcaccctacccatcagcatcattacggccactacaaatcagacgccagggctgaatatcatcacagagtacataatgggagttatattgccaggaaaaccaatagctaatgtgtgcttcaaaacttatgggtacataagcatggttcaggctatctcttttctcggtgatttcaagctaggccattacatgaagatccctccaagatcaatgttcttggttcaactcataggaaccctgatagctggatcagtgaatctctttgtagcaatgtggcttctggattccattgacaatatatgtcaggaggagctccttccagaaaacagtccttggacatgccctggtcagcgagtcttcttcgatgcatctgttatctggggtttagtggcgccccagcgaattttcggaacactcggcaactatggagcactgaactggttcttccttggtggactacttggtccagttgcagtatggatcctccatatcttattccccagccaatcttggattccccttgtcaaccttccagtgctcataggagcaaccgcatctatgccaccagccacccccgtgaactataatgcatggattttagttggaaccatcttcaactttttcgtgttcaggtacaggaagaagtggtggcagaggtataactacattctttcagcagctttggatgctggggttgcttttatggcggttctgatctacttcactgtgggcattgaggaaaagaacttgtactggtggggcgccaaccctgatatcgatcctgaacactgtccactagcatcttgtcctactgccaagggtgttattgtggatggttgcccacgcttttaa

SEQ ID NO: 240 - protein, 757 aa, Vitis vinifera
MGTVEIEAPIIKTRTDEDVKEDELSPIEEVRLTVPNDDDPSLPVWTFRMWFLGLISCALLSFLNQFFSYRKEPLVISQITVQVATLPIGRFMASVLPDIKFHVHIPFFGKKELSLNPGPFNMKEHVLISIFANAGSAFGGGSAYAVGIVTIIKAFYKRNISYLAGWILIITTQVLGYGWAGLLRKYVVEPAHMWWPSTLVQISLFRTLHGKENEVDEQETEVQQRTSRSKFFLIAMLCSFLWYMVPGYLFQSLQSIAWVCWAFPNSVTAHQIGSGFRGLGFGALTLDWTVVASFLFSPLVCPFFAIVNVFIGYVLIIYIVMPISYWGLNVYNARTFPIFSSHLFTAQGQSYNITAIVNDKFEIDLAQYDIQGRLNLSLFFALAYGFGFATIASTLSHVGLFYGREIYTRFRASQDEKVDIHTKLMKKYEDIPSWWFHLLLTGSVLVSLALCIFLKDEVQMPWWGLIFAAGLAFVFTLPISIITATTNQTPGLNIITEYIMGVILPGKPIANVCFKTYGYISMVQAISFLGDFKLGHYMKIPPRSMFLVQLIGTLIAGSVNLFVAMWLLDSIDNICQEELLPENSPWTCPGQRVFFDASVIWGLVAPQRIFGTLGNYGALNWFFLGGLLGPVAVWILHILFPSQSWIPLVNLPVLIGATASMPPATPVNYNAWILVGTIFNFFVFRYRKKWWQRYNYILSAALDAGVAFMAVLIYFTVGIEEKNLYWWGANPDIDPEHCPLASCPTAKGVIVDGCPRF

SEQ ID NO: 241 - DNA, 2223 bp, Vitis vinifera
atggcctctctagaaatagacggttcaaggagatcaaaatcagtagaagaaatcgacgagtacgaattgtctcctatcgaggaggttcgattaaccgtgcccaccaccgacgatccctcgctgcccgtatggacgtttcgaatgtggtttctgggtttgatatcatgtgtgcttctgtccttcctcaacaccttcttcggttacaggacggagcccctggtaatcaccatgatatctgtgcaggtcgccacgcttccggtgggacggttcatggcgaaggtgctgcctaagaccaagtttcgggtgcctggttttgggtcgagggagtactctttgaacccggggcccttcaatgtaaaggagcatgtgctgatatccatattcgcaaatgccggtgcggcatttgggagtggaacggcttatgctattagtattgtggatatcattaaggctttctaccacagagagatctctttctcggcttgttggattcttgtgatcacaacccaggttctagggtatggttgggccgggattctgaggaagttcgtagttgacccggcggagatgtggtggccgagtagtcttactcaagtctctttattcagcgcacttcacgagaaagacaagaagcggatgacaagagcgaaattcttcttaatcgcactcatctgcagcttctcctggtatgtggttccagggtacctcttccctaccttgggaaccatcagttgggtgtgctgggtattcccaaattctatcacagcccagcagatcgggtctggaatgcgtggcctaggcatcggggccttgactcttgactggtcagtcatagcttcattccttggcagccctctcatcactcccttcttcgccattattaatgtccttgcgggctatgtcattttcatgtaccttatcacccctgtagcctactggggacttaacgtatacaatgccaagaacttccctatcttctcctcccatttattcaatgcccagggacaaaggtataatgtttctgcaatagtgaataataagttcgagatagacatggaaacatatcagaagcaaggacacatacaccttagcattttcttttctatttcatacggccttgggtttgctgctgttatatctactctcacgcatgtggccttgtttaatggaagggaaatatataaacaattccgagctacatacaagggaaaggaagacattcacacaaaactcatgaagaattacaaggacatacccaacacgtggtttcacctgatgctggggctgtcattggctctgtctctgatcctctgcatcttcatgaaagatgagatccaaatgccatggtggggactcatctttgcagcattcctagcattgacattcacccttccaatcagcatcataactgctacaacaaatcagacaccaggactgaatatcgtcacagaatacctcatgggagtcatattaccaggacggccaattgctaatgtctgcttcaaaacctatgggtatataagcatggcacaagcagtctcctttctcaatgatttcaagcttggccattacatgaagattcctccccgatcaatgtttgtggttcagttcattggcaccatcatagctggaacggtgaacattacagtggcatggtggctgctgacaagcattgagaacatttgccaggatcaattacttcctcctaatagtccttggacatgcccaggtgatcgagtcttctatgatgcatctgtcatctggggtttggtagggcccagacgaatatttggggatctgggagactactcagccctcaactggttctttctcgttggcgcactgggacctgtgttggtttggttgctgcataaagcattccccacacagaaatggatttcactcgttaacctcccagtacttctcggagcaacgggtgcaatgccaccagctacaaccctgaatttcaacgcatggatctttgttggaacaatattcaatttcttcatcttcagataccgaaagaattggtggcagaggtacaattatgttctctcggccgcactggacgctgggttggctttcatgggagtccttttgtacttctcactgaccatggcgaacagaagtatatcctggtggggtgcggaaggtgagcactgtgggttggcctcatgtccaacagccaaaggcatcgtggtagacgggtgtcctgtacattga

SEQ ID NO: 242 - protein, 740 aa, Vitis vinifera
MASLEIDGSRRSKSVEEIDEYELSPIEEVRLTVPTTDDPSLPVWTFRMWFLGLISCVLLSFLNTFFGYRTEPLVITMISVQVATLPVGRFMAKVLPKTKFRVPGFGSREYSLNPGPFNVKEHVLISIFANAGAAFGSGTAYAISIVDIIKAFYHREISFSACWILVITTQVLGYGWAGILRKFVVDPAEMWWPSSLTQVSLFSALHEKDKKRMTRAKFFLIALICSFSWYVVPGYLFPTLGTISWVCWVFPNSITAQQIGSGMRGLGIGALTLDWSVIASFLGSPLITPFFAIINVLAGYVIFMYLITPVAYWGLNVYNAKNFPIFSSHLFNAQGQRYNVSAIVNNKFEIDMETYQKQGHIHLSIFFSISYGLGFAAVISTLTHVALFNGREIYKQFRATYKGKEDIHTKLMKNYKDIPNTWFHLMLGLSLALSLILCIFMKDEIQMPWWGLIFAAFLALTFTLPISIITATTNQTPGLNIVTEYLMGVILPGRPIANVCFKTYGYISMAQAVSFLNDFKLGHYMKIPPRSMFVVQFIGTIIAGTVNITVAWWLLTSIENICQDQLLPPNSPWTCPGDRVFYDASVIWGLVGPRRIFGDLGDYSALNWFFLVGALGPVLVWLLHKAFPTQKWISLVNLPVLLGATGAMPPATTLNFNAWIFVGTIFNFFIFRYRKNWWQRYNYVLSAALDAGLAFMGVLLYFSLTMANRSISWWGAEGEHCGLASCPTAKGIVVDGCPVH

SEQ ID NO: 243 - DNA, 2196 bp, Vitis vinifera
atggctgagattggtgaagctgcagccatggaggctggagtttcctacgagtgtcctatcaaacaagtggatgtcacagttcctaaaactgatgatcccactattcctgttctcaccttcagaatgtgggttctgggtctgtcttcatgtattgttttatcctttgtgaaccagttcttctggtacagatcacagccattgataatttcatcaatatctgcacagattgctgttgtgcctataggccatttgatggccaaaaagatcacaaagcgggtgttcttaaagggttctaggtgggagtttacacttaatcctgggccttttaatgtcaaggagcatgttttgatcaccattttcgccaactcgggtgctggaactgtttatgctactcatatcttgactgcagtgaagcttctgtataagaggaacctcactttcattcctgccttgcttgttatgacaaccactcaggtgttggggttcggctgggcaggacttttccggaaatttctggttgagccgggagagatgtggtggccttctaacctggttcaggtttcactgttcagagctctacatgagaaggaaaagaggcctaaaggcggcacaacccggactcagttcttcctcatagtctttatttgcagtttcacatactatgtggctcctgggtatctcatcaacatgttaacatctttctcctgggtctgttggcttgctcctaaatccattctggtgcaacaactcgggtcaggcttggaaggcctaggaatcggctcaattgggttggattggtctacgatttcatcatatctagggagtccattggctagcccctggtttgccacagccaacgttgcccttggattctgcctagtgatgtatgtgatgacacctgccacatactggagcaatgtctacaatgccaagaacttccctctatattctgaaaagcttttcacgtcgaatggttcacgttataacattttaagcatcattgattctaactttcatcttagtaaagaacaatatgtgaagagtgggcctttaaatatgagcaccttctttgctatgacctatggtctcgggtttgccacactttctgctactattgtccatgtcgcactcttcaatggcagtgagctatggaaacaaacaaaaggtgcctttggagagaaaaagatggatatacatacatggcttatgaagaagtacaagtcagtgcccaattggtggttttttgtgatccacgttgtgaacattgccactatcatatttgcatgtgagtattacaatgacgtacttcagttgccatggtggggtgtcttgcttgcttgtgccattgcctttttcttcacccttccaatcggcatcatcactgctacaacaaaccagacaccaggtttgaacattgtaacagaatatgttatgggatatatgtacccaggccgtcctgttgccaacatgtgcttcaaggtttatgggtacatcagcatgactcaagctctaacctttctggccgacttcaagctgggccactacatgaagattccacctagatcaatgttcatggcacaggtggtaggaacagttgtggctgtaattgtatacgtgataactgcctggtggctgatggcaaccattcccaacctctgtgataccactatgttgcctgcagacagtccatggagatgcccaatggacaatgtcttcttcgatgcctctgttatttgggggcttattggcactcgccgaatctttggaaacctgggtgcctactcgaatgtcaactggttctttctgcttggagccattgcccctctcctagtctggctcatgcacaaggcattcccaaaaaagaaatggattccccttatccacatgccagtcttgttaggttccacagcaatgatgcccccagcctctgctgttaacttcacgagttggatcattgttgggttcctctctggatttgtaatcttcaggcacaaaccaaagttgtgggagcgctataactatgttgtttctggtggtcttgatgctggaactgccttcatgaccatattaatattccttaccctcgggtccaggaatgttagcatcgactggtggggaaacaatccagaaggatgccccttggcttcatgcccaactgccaaaggaattgtagttgatggctgccctgttttctga

SEQ ID NO: 244 - protein, 731 aa, Vitis vinifera
MAEIGEAAAMEAGVSYECPIKQVDVTVPKTDDPTIPVLTFRMWVLGLSSCIVLSFVNQFFWYRSQPLIISSISAQIAVVPIGHLMAKKITKRVFLKGSRWEFTLNPGPFNVKEHVLITIFANSGAGTVYATHILTAVKLLYKRNLTFIPALLVMTTTQVLGFGWAGLFRKFLVEPGEMWWPSNLVQVSLFRALHEKEKRPKGGTTRTQFFLIVFICSFTYYVAPGYLINMLTSFSWVCWLAPKSILVQQLGSGLEGLGIGSIGLDWSTISSYLGSPLASPWFATANVALGFCLVMYVMTPATYWSNVYNAKNFPLYSEKLFTSNGSRYNILSIIDSNFHLSKEQYVKSGPLNMSTFFAMTYGLGFATLSATIVHVALFNGSELWKQTKGAFGEKKMDIHTWLMKKYKSVPNWWFFVIHVVNIATIIFACEYYNDVLQLPWWGVLLACAIAFFFTLPIGIITATTNQTPGLNIVTEYVMGYMYPGRPVANMCFKVYGYISMTQALTFLADFKLGHYMKIPPRSMFMAQVVGTVVAVIVYVITAWWLMATIPNLCDTTMLPADSPWRCPMDNVFFDASVIWGLIGTRRIFGNLGAYSNVNWFFLLGAIAPLLVWLMHKAFPKKKWIPLIHMPVLLGSTAMMPPASAVNFTSWIIVGFLSGFVIFRHKPKLWERYNYVVSGGLDAGTAFMTILIFLTLGSRNVSIDWWGNNPEGCPLASCPTAKGIVVDGCPVF

SEQ ID NO: 245 - DNA, 2601 bp, Zea mays
ggacaggtaggcgcacatgccacatcccccgcgagcaactactaccatggcatcctcccctccacctcctcgccaggaagaggaccagcaacgggaagaagggcaccaccatggcgacggaggcgacgacgaccagatcaccacaccgctcctggtggaagcggcgacgacgtcgtcgccgtcgccgtcggagggagacgatccagagaactcgccgatcgagcaggtggcgctgacggtgccggtgggcgacgacccgtcgacgccggtgctgacgttccggatgtgggtgctgggcacggcgtcgtgcgcgctgctgtcgttcctgaaccagttcttctggtaccgcaaggagccgctgaccatcacggccatctcggcgcagatcgcggtggtgccgctgggccgcctgatggcggcggcgctccccgcgcgcgccgtgctccgcggcacccgctgggagttctcgctcaacccgggccccttcagcgtcaaggagcacgtgctcgtcaccatcttcgccaactccggcgccggcaccgtctacgccatccacgtcatcaccgccgtccgcgtcttctacggcaagcacatcaccttcttcgtctccctcctcgtcgtgctcaccacccaggtgctggggttcggctgggcgggaatattccggcggtacctggtggagccggcggcgatgtggtggccgtctaacctcgtgcaggtctccctcttcagggcgctccacgagaaggagcggcgcgtgaagggaggcatgacgcggaaccagttcttcctggtggcattcgtctgcagcttcgcctactacgtcttcccgggctacctgttccagatgctcacctccctgtcgtggctctgctgggcgttcccgcgctccgtggtggcgcagcagctggggtcggggctgagcgggctgggcgtgggcgcggtggggctcgactggtccaccatctcctcctacctcggaagcccgctcgccagcccctggttcgccaccgccaacgtggccgccggcttcgtcctcatcatgtacgtcatcacgcccgccgcgtactactggctcggcctgtacggggcgcgcagcttccccatcttctccgacgggctcttcaccgccgccgggcagacgtacaacatctccagcatcgtggactccaacttccggttcgacaccgaggcatacgagcgcaacggcccgctctacctcagcaccttcttcgccgtcacctacggggtcggcttcgcgtccctctccgccacggttgtgcacgtcttcctcttccacgggagcgagatctggcagctgagcaggtcagcgttccaagagaagaaggtggacgtgcacacgaggctgatgaggaggtacaggcaggtccccgagtggtggttcatctgcatcctcgtcgccaacgtcgccgtcaccatattcacctgcgagtactacatcgagcagctccagctgccctggtggggcgtcctgctcgcctgcgccatcgccttcttcttcaccctcccgatagggatcatcacagcgacgacgaaccagactccaggcctgaacatcatcaccgagtacatcatggggtacctgtacccgggccgtcccgtcgccaacatgtgcttcaaggtgtacggctacatcagcatgacgcaggcgctggccttcctgcaagacttcaagctgggccactacatgaagatcccgccgaggaccatgttcatggcgcaggtggtggggacgctgatcgcggcgcttgtgtacatcgggacggcgtggtggctcatggacagcgtccccaacatctgcagcacggagctgctccccgccgacagcccctggacgtgccccatggaccacgtgttctacgacgcgtccgtcatctggggcctcatcggcccgcgcaggatcttcggcgacctcggcacctactcggcggtcaactggttcttcctgggcggcgccgtcgcgcccctcctcgtgtggctcgcgcaccgggtgttcccgagccagagctggatcctgctcgtcaacatgcccgtgctcatcggctccaccggcatgatgccgccggccaccgccgtcaactacaccacgtggatcattgccgggttcctgtcggggtacgtggtctacaggtaccggcgtcactggtgggagcgccacaactacctgctttctggcgcgctcgacgctggcctggcgttcatggccgtgctcatctacctgtgcttgggcttggagaacgtcggcctcaactggtggggcaatgatctggacgggtgccctctcgcctcttgtcccactgccaaaggtatcgttgttgagggctgcccggtgtatacatgaggaattgagaacccatgcattcggagaagagaacatggcaatgcaagtggacaagtgtctcaagagcaatgtaaataatttatcttttcaaacaatttagggatgggaaattggtgttcctttcattgtaaaatggctggtaattacggctattccagctcggaatcaaatttattccgtggtacaacaaaacataatttattcaaaaaagcgatctcgcatgctcaggaacgctggtg

SEQ ID NO: 246 - protein, 781 aa, Zea mays
MPHPPRATTTMASSPPPPRQEEDQQREEGHHHGDGGDDDQITTPLLVEAATTSSPSPSEGDDPENSPIEQVALTVPVGDDPSTPVLTFRMWVLGTASCALLSFLNQFFWYRKEPLTITAISAQIAVVPLGRLMAAALPARAVLRGTRWEFSLNPGPFSVKEHVLVTIFANSGAGTVYAIHVITAVRVFYGKHITFFVSLLVVLTTQVLGFGWAGIFRRYLVEPAAMWWPSNLVQVSLFRALHEKERRVKGGMTRNQFFLVAFVCSFAYYVFPGYLFQMLTSLSWLCWAFPRSVVAQQLGSGLSGLGVGAVGLDWSTISSYLGSPLASPWFATANVAAGFVLIMYVITPAAYYWLGLYGARSFPIFSDGLFTAAGQTYNISSIVDSNFRFDTEAYERNGPLYLSTFFAVTYGVGFASLSATVVHVFLFHGSEIWQLSRSAFQEKKVDVHTRLMRRYRQVPEWWFICILVANVAVTIFTCEYYIEQLQLPWWGVLLACAIAFFFTLPIGIITATTNQTPGLNIITEYIMGYLYPGRPVANMCFKVYGYISMTQALAFLQDFKLGHYMKIPPRTMFMAQVVGTLIAALVYIGTAWWLMDSVPNICSTELLPADSPWTCPMDHVFYDASVIWGLIGPRRIFGDLGTYSAVNWFFLGGAVAPLLVWLAHRVFPSQSWILLVNMPVLIGSTGMMPPATAVNYTTWIIAGFLSGYVVYRYRRHWWERHNYLLSGALDAGLAFMAVLIYLCLGLENVGLNWWGNDLDGCPLASCPTAKGIVVEGCPVYT

SEQ ID NO: 247 - DNA, 2625 bp, Zea mays
gccgagaatctctaaaaggcgccgctcccgtccacggcgcggcgggcagcagcgaagcgtcggtttcagaggccggcgggccggtcgagtcggtggagggagggtgggtagatagatagctagctactagcgggtagcggagagggtccagtcagtgggcgggaggagcgaggggccgggaccgggacgatggcgtcgcggaagtcgccggtggcggcggaggagcgggcggggacggggacgggggaggggaagggggagcggtgcgcggtggaggaggtggcgctggtggtgccggagacggacgacccgtcgatgcccgtgatgacattccgggcgtgggcgctggggctcggctcctgcgtcgtcctcatcttcctcaacaccttcttcacgtaccgcacccagccgctcaccatctcggggatcctggcgcagatcctcgtgctccccgccggccgcttcctggccgccgtgctgcccgaccgcgaggtcaggatcctcggcggcaggctcggcagcttcaacctcaacccggggcccttcaacgtcaaggagcacgtcatcatcaccatcttcgccaactgcggcgtctcctacggcggcggcgacgcttactccatcggcgccatcaccgtcatgaaggcctactacaagcagacgctcagcttcgcatgcgccctcctcatcgtcctcaccacacagatactggggtacggctgggctgggttgctgaggaggtacctggtcgaccctgccgagatgtggtggccttctaaccttgcccaggtctcactcttcagggcgctgcacgagaaagaagaggagggcggcaagtcccgtggcccgtcgcggatgcgcttcttcctcatcgtcttcttcgcgagcttcgcgtactacgcgctgccggggtacctgctgccgatcctgaccttcttctcgtgggcgtgctgggcgtggccgcacagcatcacggcgcagcaggtcgggtccgggtaccacggcctcggcgtcggcgcattcacgctcgactgggcgggcatctcggcgtaccacggcagcccgctggtggcgccgtgggcgtccatcgccaacacggccgtgggattcgtcatgttcatctacgtcatcgtgccgctctgctactggcagttcaacacgttcgacgcccgcaggttccccatcttctccaaccagctcttcacggcgtcgggccagaagtacgacaccaccaaggtgctcaccaaggacttcgacctcaacgtcgccgcctacgacagctacgggaagctctacctcagcccgctcttcgccatctccatcggctccggcttcctgcggttcacggccaccattgtccacgtcctgctcttccatggcagcgacatgtggaagcagagcaagtcggccatgaacgcggtgaagctggacgtgcacgccaagctgatgcagaggtacaggcaggtgccgcagtggtggttcctcatgctgctgctgggcagcgtggtggtgtccctgctcatgtccttcgtctggaaggaggagatgcagctgccgtggtgggggatgctcttcgccttcgcgctcgccttcgtcgtcaccctccccatcggcgtcatccaggccaccactaaccagcaaccggggtacgacatcatcgcgcagttcatgatcggctacgcgctgcccggcaagcccatcgccaacctgctcttcaagatctacggccggatcagcaccgtgcacgcgctatcgttcctcgcagacctcaagctcggccactacatgaagatccccccacggtgcatgtacacggcccagctggtcgggacggtggtcgccggcgtggtgaacctggcggtggcgtggtggatgctggacaacatcgagaacatctgcgacgtggaggcgctgcacccggacagcccgtggacgtgccccaagtaccgcgtcacgttcgacgcgtcggtgatctggggcctgatcggcccggggcggctcttcggccagcacgggctgtaccgcaacctggtgtggctgttcctggtcggcgcggtgctccccgtgccggtgtggctgctgagcagggcgttcccggagaagaagtggatcgcactcatcaacgtgcccgtcatctcgtacgggttcgccgggatgccgccggccacgcccaccaacatcgccacctggctggtgacgggcaccatcttcaactacttcgtcttcaggtaccgcaaggggtggtggcagaagtacaactacgtgctatcggcggcgctcgacgccggcaccgccttcatgggtgtgctcattttcttcgccctccagaacgcgcaccacgagctcaagtggtggggcacggaggtggatcactgcccactcgcctcctgccccaccgcgccgggcatcgccgtcaagggctgcccggtgttttgaatcttccgacgtgagcgtagtaagcagtgtgtgtaacagtgtaaggaaatgtttgctacgggagccatggattcaaccaagcatcgattaaccgatgcagtgctttgtcactcgtgaatgtaacgccatagcgccagtggtggattcagatttcagagggagaaaaaaacacaggcccagtgtctttgg

SEQ ID NO: 248 - protein, 748 aa, Zea mays
MASRKSPVAAEERAGTGTGEGKGERCAVEEVALVVPETDDPSMPVMTFRAWALGLGSCVVLIFLNTFFTYRTQPLTISGILAQILVLPAGRFLAAVLPDREVRILGGRLGSFNLNPGPFNVKEHVIITIFANCGVSYGGGDAYSIGAITVMKAYYKQTLSFACALLIVLTTQILGYGWAGLLRRYLVDPAEMWWPSNLAQVSLFRALHEKEEEGGKSRGPSRMRFFLIVFFASFAYYALPGYLLPILTFFSWACWAWPHSITAQQVGSGYHGLGVGAFTLDWAGISAYHGSPLVAPWASIANTAVGFVMFIYVIVPLCYWQFNTFDARRFPIFSNQLFTASGQKYDTTKVLTKDFDLNVAAYDSYGKLYLSPLFAISIGSGFLRFTATIVHVLLFHGSDMWKQSKSAMNAVKLDVHAKLMQRYRQVPQWWFLMLLLGSVVVSLLMSFVWKEEMQLPWWGMLFAFALAFVVTLPIGVIQATTNQQPGYDIIAQFMIGYALPGKPIANLLFKIYGRISTVHALSFLADLKLGHYMKIPPRCMYTAQLVGTVVAGVVNLAVAWWMLDNIENICDVEALHPDSPWTCPKYRVTFDASVIWGLIGPGRLFGQHGLYRNLVWLFLVGAVLPVPVWLLSRAFPEKKWIALINVPVISYGFAGMPPATPTNIATWLVTGTIFNYFVFRYRKGWWQKYNYVLSAALDAGTAFMGVLIFFALQNAHHELKWWGTEVDHCPLASCPTAPGIAVKGCPVF

SEQ ID NO: 249 - DNA, 2194 bp, Oryza sativa; identical to SEQ ID NO: 154

SEQ ID NO: 250 - DNA, 50 bp, Artificial sequence
  primer: prm09267
ggggacaagtttgtacaaaaaagcaggcttaaacaatggccaccgccgac

SEQ ID NO: 251 - DNA, 52 bp, Artificial sequence
  primer: prm09268
ggggaccactttgtacaagaaagctgggtcacaccaatggatcctttaagat

SEQ ID NO: 252 - DNA, 1406 bp, Populus trichocarpa
actgttcgttgcacaaattgatgagcaatgcttttttataatgccaactttgtacaaaaaagcaggcttaaacaatgaatggaaaggaaatttacggaaagcaagttgatattgaattcagtcgtcctggtgggtatggaaagaagtttttcaatgccagcaccaccacttccaaaacctccttctctgctcctgacatcaactccacaacaaaccttaaccgtcctagaatttcaacttacgcctctccaccatcaccaccattgcttcgtagattctcctccggctgctcgtctccgaatatctccccccgctcatttccgtctgaaactcactcctcagctggaaagaaaccgtctggtaatcctggcaagggaaaccctaatgaggcttcaaatgaagctgcttcatcggggtgcttgtcattgggtggtggtgcagttggagatggaattgttgagaaggttactgatcatgggcatcccaagaaaagctcaaaaaagagccagaacagccagtccttcacagctacaaagcatcaacagaagagtgcgaagtcatggaagggaacaaggcaagcgaagaagtttgatactcgttttctcataagtggtgatgattccatggtggaaaccagtggtagtgattccagaaccactgtcatgatcaagaacatacccaacaagtatagtcagaagctgttgttgaatatgttggacaatcactgcattcactgcaacgagcagattgccgatggggatgaccagcccttgtcttcttatgactttttataccttcccattgatttcaataacaaatgcaatgtggggtatgggttcgtgaacatgacgtccccacaggcagcatggaggctctacaaggccttccataatcaacactgggaggtcttcaactctcgaaaaatctgtgcagtcacttacgctagagttcagggattggaagcgttgaaggagcactttaagaactcaaagttcccgtgcgagatggaccactatcttccagttgttttttctccgcctcgagacgggaggcaacagacggagcctctccccattattggcctcaagcagctccaacagcccatcaatctaggtcaccgcccccaccatgagattgaagatggtgtagatgatagcagcctcaagacttgcaacaaattgtgtggtaacactgaccaagaaggagaaaaccagcacaagtgctgtagcagcatcagcagcagcagccaaaacggcggcgatgttggtgatgatgacaaagacagtagtggcggcagcaactagacgataggagtacccagctttcttgtacaaagttggcattataagaaagcattgcttatcaatttgttgcaacgaacaggtcactatcagtcaaaataaaat

SEQ ID NO: 253 - protein, 409 aa, Populus trichocarpa
MNGKEIYGKQVDIEFSRPGGYGKKFFNASTTTSKTSFSAPDINSTTNLNRPRISTYASPPSPPLLRRFSSGCSSPNISPRSFPSETHSSAGKKPSGNPGKGNPNEASNEAASSGCLSLGGGAVGDGIVEKVTDHGHPKKSSKKSQNSQSFTATKHQQKSAKSWKGTRQAKKFDTRFLISGDDSMVETSGSDSRTTVMIKNIPNKYSQKLLLNMLDNHCIHCNEQIADGDDQPLSSYDFLYLPIDFNNKCNVGYGFVNMTSPQAAWRLYKAFHNQHWEVFNSRKICAVTYARVQGLEALKEHFKNSKFPCEMDHYLPVVFSPPRDGRQQTEPLPIIGLKQLQQPINLGHRPHHEIEDGVDDSSLKTCNKLCGNTDQEGENQHKCCSSISSSSQNGGDVGDDDKDSSGGSN

SEQ ID NO: 254 - DNA, 1584 bp, Arabidopsis thaliana
atgtctgtcaccggaccattcagtcacccaacaaaccttaacccaacagctccggcgttctttccggcgataaaccaacaccaaaaccaaaacccctccttaattccgacaagattcttcctccctcatccccctcctcctcctcctcctccgccgccgccgctatacttttcttatttctctctccctcctcctcctcctcctcctcatcttccaccgacttcagtaacaccaaccagagccgtgatgttattacaagtcccagctaccgtcactgagacatctctaagacgagacatggaactattcggtgaagtccgtggagtccaaatggaaagagcacatgaaggaatcgtgattttccatttctacaatctaataaactcacaaagagcttttaacgagatacgttaccgtcacatgcaacaacaggaacaacaacaacatttccacttcacgacggcgcgtggactcgtctccggtcattctctttgggcccatttcgtgtttcctcaactcaatgctgttcctgaaggaaacaatcaaggctctcttgtcattatgaacttagaacccaccgtctcttcctcaactctccgtcacattttccaagtttatggagaagtgaagcaggtgagagagacgccgtgtaagagagaacaaagatttgtggagttttttgacgttagagacgctgcaaaagctctccgtgtaatgaacggaaaagttatctccggtaaaccaatggttatccagtttagtcgtcccggtggtttaaccaagaaactcttcttcgcttcacacttccataaaaacttcatctttaacaacgaacaccattattatccaccgccaccaccaccatcacgaatggtgaagtcggatattctaatgtacaagcaacaacaaaagaagaagaagaagaagtatgtaaagaagaatcttggtgatccttatttcatgataaacgaaaacgctatcaccggcggagagttcagagacggaagaaccaccgtgatgatcaagaacatccctaacaagtacacacagaagctgcttttgaagatgttggacacacattgtaaagattgtaaccaaagtgtaatcaaagaagggaacaaaactcctatgtcttcttatgactttgtctacctccccattgatttcagcaacaaaagcaatgtgggatatgggtttgtgaacatgacatcaccagaagcagtgtggagactttacaagagctttcacaatcaacattggagagatttcaccaccactagaaagatctgtgaggtcacttatgctcgtatccagggtcttgagtcattaagggaacatttcaagaacgttaggctagcaggagtagagatagacgagtacatgccggttgttttctcgccgccgcgtgatggacggttgtcaccggagcctgtggctattgttgacccttgggataaaccagtggatgatgaagacagatgttgtaagtcacgagacgggtttgttgtgtccgacaagaagatggtaggaagtgatggttgtggtttttgtcttagtgagagaatcgaaaacggcggcgtttga

SEQ ID NO: 255 - protein, 527 aa, Arabidopsis thaliana
MSVTGPFSHPTNLNPTAPAFFPAINQHQNQNPSLIPTRFFLPHPPPPPPPPPPPLYFSYFSLPPPPPPPHLPPTSVTPTRAVMLLQVPATVTETSLRRDMELFGEVRGVQMERAHEGIVIFHFYNLINSQRAFNEIRYRHMQQQEQQQHFHFTTARGLVSGHSLWAHFVFPQLNAVPEGNNQGSLVIMNLEPTVSSSTLRHIFQVYGEVKQVRETPCKREQRFVEFFDVRDAAKALRVMNGKVISGKPMVIQFSRPGGLTKKLFFASHFHKNFIFNNEHHYYPPPPPPSRMVKSDILMYKQQQKKKKKKYVKKNLGDPYFMINENAITGGEFRDGRTTVMIKNIPNKYTQKLLLKMLDTHCKDCNQSVIKEGNKTPMSSYDFVYLPIDFSNKSNVGYGFVNMTSPEAVWRLYKSFHNQHWRDFTTTRKICEVTYARIQGLESLREHFKNVRLAGVEIDEYMPVVFSPPRDGRLSPEPVAIVDPWDKPVDDEDRCCKSRDGFVVSDKKMVGSDGCGFCLSERIENGGV

SEQ ID NO: 256 - DNA, 1848 bp, Arabidopsis thaliana
atggaagactccagactttttccgttcgtcggaaacttagaccctcgtgctcaagagtttataccattcaaccctatctcctccggttttcactttccgtacactcctcctcctccacagcttcctcctccgttacctccgtcgtcgtacggattatctccgacggagccaagagttttcacattcttcaatatcccaccacatccgatgatgttttctcctcctcctcctcaaccaccaccaccaccaccgcgtccatgtttcaacggcgtttcggcagctcaacggcttcctctgccgtcaaatactccgacgcgatctctctctttgatctccgtaccacgtgacgtaaccgagtctacggtgagacgtgacttggaggtttacggcgacgttcgtggcgtgcaaatggagagaatctctgaaggaatcgtgaccgtccatttctacgatatacgtgacgctaaaagagcggtacgtgaagtttgtggtagacacatgcagcaacaagctagaggtggaagcgtctggagctcaccttctacttcatcggcgcgtgggtttgtttccggtagacctgtgtgggctcagttcgtagttccggcgactagtgccgttcccggaggttgtaaccaaggaacgttagtaatatttaacttagaccctgaggtctcttccattactctcagacagattttccaagtttacggtccgatcaaagagttgagagagacaccgtacaaaaaacatcaaaggttcgttgagttttatgatgtgagagacgcggcgagagcgtttgatcgaatgaatggtaaagagattggtgggaagcaagttgtgatcgaatttagtcgacctggtggaattaagaacaggttcaggtcatctaggcaaccgcagctaccatttcaaccgcttcgagagccaccaatcctaattcctcctttgaggcggccagtatctttcatcaaagataaaaacaagaatgtgagccctaaaaatggagttattgctgttgatgcttctatgcgttccttatgtatcatcgatgctgacgataataagactcgaggaacccgaggaacggaatccgaatgcgcggagacaaaaagcaagaatgtggctaagtgggggaagaaaagacagatgaagaacatggaactaagtcagtttcttatcagtgaagaaaccatggaagatccgagttgcagagatccacgtaccactttgatgatcaagaacataccaaacaagtacagtcaaaagctactgttggatatgttggacaagcattgcattcacataaacgaagcaatcaccgaggagcacaataaacatgagtctcatcatcagccgtattcttcttatgatttcgtgtatctccccatggatttcaacaacaagtgcaatgttggttatgggtttgtgaacatgacatctccggaagcagcttggaggttttacaaggcatttcatggtcagcgttgggaggtttttaattcgcataagatttgccaaatcacatatgcgagagttcagggtttggaggatctaaaggaacacttcaagagctcgaaatttccatgcgaggctgagctatacctgccggtggtcttctcgcctccacgagatgggaagcagttaacagaacctgtctccatcaacataaccatcaacggctgcaccagacttaatcataatcattttgagcaaacagtcggtcaagatcactttctgagtggatcatgttgtgacagtgaccatgataacagtcatgaagatggattttccggcagtagcgtagactgtggccggagtatcaccgtggaaggagaaacatctttctag

SEQ ID NO: 257 - protein, 615 aa, Arabidopsis thaliana
MEDSRLFPFVGNLDPRAQEFIPFNPISSGFHFPYTPPPPQLPPPLPPSSYGLSPTEPRVFTFFNIPPHPMMFSPPPPQPPPPPPRPCFNGVSAAQRLPLPSNTPTRSLSLISVPRDVTESTVRRDLEVYGDVRGVQMERISEGIVTVHFYDIRDAKRAVREVCGRHMQQQARGGSVWSSPSTSSARGFVSGRPVWAQFVVPATSAVPGGCNQGTLVIFNLDPEVSSITLRQIFQVYGPIKELRETPYKKHQRFVEFYDVRDAARAFDRMNGKEIGGKQVVIEFSRPGGIKNRFRSSRQPQLPFQPLREPPILIPPLRRPVSFIKDKNKNVSPKNGVIAVDASMRSLCIIDADDNKTRGTRGTESECAETKSKNVAKWGKKRQMKNMELSQFLISEETMEDPSCRDPRTTLMIKNIPNKYSQKLLLDMLDKHCIHINEAITEEHNKHESHHQPYSSYDFVYLPMDFNNKCNVGYGFVNMTSPEAAWRFYKAFHGQRWEVFNSHKICQITYARVQGLEDLKEHFKSSKFPCEAELYLPVVFSPPRDGKQLTEPVSINITINGCTRLNHNHFEQTVGQDHFLSGSCCDSDHDNSHEDGFSGSSVDCGRSITVEGETSF

SEQ ID NO: 258 - DNA, 1575 bp, Medicago truncatula
atgggagaaaccttaaaccctactgctccagagtttaatccaaacagctacattcccattccagtcgccgtcggtattccctacccctatccaccctacgccgtcacaccgccgccgcacctttccacaatacccacccgctctattctcctcagtcccgcccctcccacccctgaaactgacctccgaaaagacctttcagctttcggtgaagtgagagccgttcaaacggactcattccgtaacggagtcataactgctcattactatgatcttagacacgcagagacggcgtttgccgctattcggactcatcacgtcctctgcgctgcctatttcaaccctctatcttattcccaaattttccccacgccactacctccgccgccaccgggtctcgtcgccggtgcaccgctgtgggcccattatgtactctccgatgctcagaatcaaggaaccctagttgttttcaacttagatgacgacgtttcttctgatcagctgcaacaagttttcggagcttttggagcaattaaggaagtgagggatacaccatggaagaaaaggaatcaaagttttgttgagtttttcgacataagagatgctgaaaaagctttgaaagaattgaatggcaaagagattaatggaaaaccaattgctattgagtttagtaaaccaaaattatttcattctgaacccaatgcttatatctctaataagccttttaattacaaccttaatccacctccttccccgcgacgtcattttgcttcacaacctcattcaccacaattatctcacaagagtttgacatttaaccgggtaaaccacaataggattggttcaatgggttcattgaagggtgaagagaggtatccttttgttagagttcaaagtagagagagttttggggaaagtgcttggagttggaaggggaagttagcaaagagacatgaaaatcgttttctaatcaaagaagatgccattgttgaatctgatcctagaaccactctcatgatcaaaaacatacccaacaaatacagtcagaagttactgttgaatatgctggacaaccactgtgtacactgcaatgagcagctaggcgacggcgagcctctctcctcctatgactttgtgtatcttcctatagattttaagaacaaatgcaacgtgggatatggattcgtgaatatgacatctcctgaggcaacgctaagattctacaaggccttccagcaccaacattgggaggtcttcaattctagaaaaatttgccaactcacatacgcaagagttcagggtttggaatcgttgaaagagcattttaagaactcaaagttcccgtgtgagatggagcattacctgccagtggtgttttcaccgcctcgagatggaaaacaattgacggagccaattccagtggcggggaacatgctacaaattggtgctgctccttctgtagctgatgagatggaaggtcaagatcatagagtaggtagtggtggctgtgacgtgatcagcagaaaaagtggcggcataggtgatgatgatgatgataaaacagatgtgaagtga

SEQ ID NO: 259 - protein, 524 aa, Medicago truncatula
MGETLNPTAPEFNPNSYIPIPVAVGIPYPYPPYAVTPPPHLSTIPTRSILLSPAPPTPETDLRKDLSAFGEVRAVQTDSFRNGVITAHYYDLRHAETAFAAIRTHHVLCAAYFNPLSYSQIFPTPLPPPPPGLVAGAPLWAHYVLSDAQNQGTLVVFNLDDDVSSDQLQQVFGAFGAIKEVRDTPWKKRNQSFVEFFDIRDAEKALKELNGKEINGKPIAIEFSKPKLFHSEPNAYISNKPFNYNLNPPPSPRRHFASQPHSPQLSHKSLTFNRVNHNRIGSMGSLKGEERYPFVRVQSRESFGESAWSWKGKLAKRHENRFLIKEDAIVESDPRTTLMIKNIPNKYSQKLLLNMLDNHCVHCNEQLGDGEPLSSYDFVYLPIDFKNKCNVGYGFVNMTSPEATLRFYKAFQHQHWEVFNSRKICQLTYARVQGLESLKEHFKNSKFPCEMEHYLPVVFSPPRDGKQLTEPIPVAGNMLQIGAAPSVADEMEGQDHRVGSGGCDVISRKSGGIGDDDDDKTDVK

SEQ ID NO: 260 - DNA, 2052 bp, Oryza sativa
atggaggaaggaggtgggagtggcgtgggtgggatgcagggagcggcgtcgaatcttctggacgccggagctcaggcgttctaccctgccgtcggcgcgccgttcccgttccagcagcttccgcaccagctgtactgcccgcagccgccgccgccgccgtaccaggtcatgccggtgccgccgccgccgccgccggtgggcttgcctgtaccgccgctgccggcgacgatggcgccgcagccgggctactgcgtgccggcggccgcgacggtggtggacggtccggccagccgcgccgtcgtgctgagcctggtgccgccgcacgcgccggaggacgagatcgcccgcgcgatggctccgttcggtgcggtgcgcgccgtggacgcgtcggcggtggcgtccgagggcgtcgcgaccgtctacttcttcgatctccgctccgccgagcacgccgtcacgggggtccgcgagcagcacatccggcagcagtgccggctcggccagctctacgccgccgccgccgccgccgccgcctcgtccccgacctggcccccgccggcgtgggactggccccacgacgacaaccgcgggctcgtcctcggccaggccgtctgggcccacttcgccgccgcctccaccgtccccgacgacggcgccagccgcggctccctcgtcgtgctcaattccctccccgccatgtccgtgttcgaactccgcgaaatcttccaagcatacggtgacgtgaaggacgtgagggagtcggcgctgcggccgagcaacaagttcgtcgagttcttcgacacgcgcgacgccgaccgcgcgctccacgagctcaacggcaaggagctcttcggccgccgcctcgtcgtcgagtacacgcgcccttccctccccggcccacgcaggcgcgggcacgtgtcgcaccagcccttggccccgacgccgccgaggctgcaggcggcttggcggccggcgccggcgccgtcgcagtctgcgcagccgtcgtcgtctggctccggcaaggcgagggaaggcgtggtgcttctgcgcaggagctccgggaaaggtagctcgggtagccagtccaagggcggtggcaatgctggccacgagcggaagagcaagggcggcaagagcgccgcggcggcgtgttcgacggcggcttcagcatcgtcgtctaccgcaacggcgcccagcaagcaaagccagaaaggcggcggcggcggcggcggccgtggcgggagctggagaggccagaagagcgggtgggaggctcgcttcctgttcaaagaacccgaggccgcggccgccgccgccggcgacgctgccgcctccgagacgcatgagccggcgagctgcaaggacacgagaaccaccgtgatgatcaggaacatcccaaacaagtacagccagaagctgctgctcaacatgctggacaaccactgcatcctctccaaccagcagatcgaggcgagctgcgaagacgaagcccagccattctcctcctacgatttcctctacctccccatagatttcaacaacaagtgcaacgtgggctatggcttcgtcaacctcacctcgccggaggctgccgtgcggctgtacaaggcgttccacaagcaaccgtgggaggtgttcaactcgcgcaagatttgccaagtgacatacgcacgcgtgcaaggcctggacgcgctcaaggagcacttcaagaactccaagttcccgtgcgacagcgacgagtacctgcccgtggtgttctcgccgccgcgggacggcaagctgctcacggagccggtgccgctggtcggccgctcgccggcaccgtcgtcggcgtccggggcgtcgtcgccgcccaagagctgcgccgcgagcgtcgacccactcgcgcaggagctcatgacagcgccgtcttcctccggcgacggcgcctcctccgcctcctcgtccaatgcccacgccgacgaggatgacgtccatggcgaaaccggtggtgaccgtggcgacgacgcggggctcgatctggagctacagcgcctaggctacactgactag

SEQ ID NO: 261 - protein, 683 aa, Oryza sativa
MEEGGGSGVGGMQGAASNLLDAGAQAFYPAVGAPFPFQQLPHQLYCPQPPPPPYQVMPVPPPPPPVGLPVPPLPATMAPQPGYCVPAAATVVDGPASRAVVLSLVPPHAPEDEIARAMAPFGAVRAVDASAVASEGVATVYFFDLRSAEHAVTGVREQHIRQQCRLGQLYAAAAAAAASSPTWPPPAWDWPHDDNRGLVLGQAVWAHFAAASTVPDDGASRGSLVVLNSLPAMSVFELREIFQAYGDVKDVRESALRPSNKFVEFFDTRDADRALHELNGKELFGRRLVVEYTRPSLPGPRRRGHVSHQPLAPTPPRLQAAWRPAPAPSQSAQPSSSGSGKAREGVVLLRRSSGKGSSGSQSKGGGNAGHERKSKGGKSAAAACSTAASASSSTATAPSKQSQKGGGGGGGRGGSWRGQKSGWEARFLFKEPEAAAAAAGDAAASETHEPASCKDTRTTVMIRNIPNKYSQKLLLNMLDNHCILSNQQIEASCEDEAQPFSSYDFLYLPIDFNNKCNVGYGFVNLTSPEAAVRLYKAFHKQPWEVFNSRKICQVTYARVQGLDALKEHFKNSKFPCDSDEYLPVVFSPPRDGKLLTEPVPLVGRSPAPSSASGASSPPKSCAASVDPLAQELMTAPSSSGDGASSASSSNAHADEDDVHGETGGDRGDDAGLDLELQRLGYTD

SEQ ID NO: 262 - DNA, 1773 bp, Populus trichocarpa
atggaagaaaacggctctgttcagtttccgggaaatctagacccaagagcacaagagttcaggcctagacgtgataaccttcacaatttctccccaaagtttcttcctttcggaccgccgcctccgccgccgccaccaccaccacctcagcttccgcaccaagtctactacacctacaccccccaagcgttgccgtttagcgactttgtaggtttcgttcagtatgatcatcatatacctccggcgtacgttagcgtggaacctcttccccctcttcctcctaccggggcgccaactcggactctggtattgagttcggtgccgagcgaagtgaacgagtcattgattaggagagaattggaggtttttggagaagttagaggggtccagatggaaagagttggttatgggactgtgaccgttcatttctacgatctaagacatgcagagagagccttgagggagatacgagagcagcacatgctgcatcaagccaggctaaggaacttctttattcaaaattctgagagcattagcttcaatattgcaccaacaccaccaccgccggcgcgtggtgtaattgctggttgtgtggtttgggctcagtttattattccgtcgtgtaacgaggtgcctgatggacagaatcaagggacccttgtggtcttcaatttggatcccaatgtttctactagaagccttaaagaaattttccaagcttttggtgctgtcaaggaggtgagagagacacctttgaagaggcaccaaaggtttatagagttttacgatgttagagatgcagccaaggcccttcgagagatgaatggaaaggaaatttatggaaagcaagttgatattgagtttagtcgccctggtgggcatgggaagaagttttttaatgccaggcccagggccacttccaaaaactcctttactactcctgtctttgactccacaaccaaccttcgccattccaaaaaaccgtctggtgatcctagcgaaggaaaccctattgaggcttcaattgaagcttctttggggtgtttgtcattgggtggagacgtaattgttgggaagcaacagaagagtgccaagtcttggaagggatcaaggcaagcgaagaagcttgatagtcgttttcttataagtgatgaatccatggtggaaaccagcggtagtgattccaggaccactgtcatgatcaagaacatacccaataagtacagtcagaagctgttgttgaatatgctggacaatcactgcattcactgcaacgagcagatagccaacggggatgaccagcccttgtcttcttatgattttttatatcttccaattgacttcaacaacaaatgcaatgtgggatatgggttcgtgaacatgacatccccgcaggcagcatggaggctctacaaggcctttcataatcaacattgggaggtcttcagctctaggaaaatctgtgcagtgacttatgctagagttcagggattggaagcgttgaaggagcactttaagaactcaaagttcccatgcgagatggaccaccatctgccagttgttttctctcctcctcgagacgggaggcaacagacggagcctcttcccattattggccacaagcacgatcaacagcccatcaatattattcttggaggagaaagccagctcaaatgcagcagcagcagcagcagcacagccaaaatggcggcgatattggtgatgatgataaagacagtagtagtggcagcagctagcatggtggcttactga

SEQ ID NO: 263 - protein, 590 aa, Populus trichocarpa
MEENGSVQFPGNLDPRAQEFRPRRDNLHNFSPKFLPFGPPPPPPPPPPPQLPHQVYYTYTPQALPFSDFVGFVQYDHHIPPAYVSVEPLPPLPPTGAPTRTLVLSSVPSEVNESLIRRELEVFGEVRGVQMERVGYGTVTVHFYDLRHAERALREIREQHMLHQARLRNFFIQNSESISFNIAPTPPPPARGVIAGCVVWAQFIIPSCNEVPDGQNQGTLVVFNLDPNVSTRSLKEIFQAFGAVKEVRETPLKRHQRFIEFYDVRDAAKALREMNGKEIYGKQVDIEFSRPGGHGKKFFNARPRATSKNSFTTPVFDSTTNLRHSKKPSGDPSEGNPIEASIEASLGCLSLGGDVIVGKQQKSAKSWKGSRQAKKLDSRFLISDESMVETSGSDSRTTVMIKNIPNKYSQKLLLNMLDNHCIHCNEQIANGDDQPLSSYDFLYLPIDFNNKCNVGYGFVNMTSPQAAWRLYKAFHNQHWEVFSSRKICAVTYARVQGLEALKEHFKNSKFPCEMDHHLPVVFSPPRDGRQQTEPLPIIGHKHDQQPINIILGGESQLKCSSSSSSTAKMAAILVMMIKTVVVAAASMVAY

SEQ ID NO: 264 - DNA, 2001 bp, Sorghum bicolor
atggagggtgggggagggagtggaataggtgggttcccgggagccccgggtaaccttctcgatgccgcagctcaggagttccaccctacggtctgtgccccctaccctctacagccgctcccgcaccagctatactgcccccacacatatccagccatgccgccgccgccgcaaatggccatgttgcagcctgtgcctccgatggcgatgcccatggcgccgcagccggggtacaccttgcccacgacggcgccggtggtcgacggcccgtccagccgcgtcgtggtgctgtgcctggtgccgccgcacgcgcaggagcgcgacgtggcgcaggcgatggcgccgttcggcgcgatccgctcggccgacgcgtgcgcggtggcgtccgagggcgtggccaccgtccatttcttcgacatccgcgccgccgagctcgccgtggcctgcgtccgcgagcagcacatgcggcagcagagccggctcgggcagctctacgcggcggccgccgtgcccccggcgtgggctcctgcaccaccgacggcgccccaggcctgggactggccccaccccaacgacgacggccgcggcctcgtcctcgggcaagtcgtgtgggcccacttcgcccccggcgccgacgacggcgagaaccgcggctccctggtggtcctgagccccctgcccggcgtctcggtcgctgacctccgccaagtcttccaggccttcggggacttgaaggatgtgagggagtcggcgcaccggcccagccacaagttcatcgacttcttcgacacccgcgacgccgcgcgcgcgctcgccgagctcaacggccaggagctcttcggccgccgcctcgtcatcgagttcacgcgcccttccggccccgggccccgcaggcgcgggtacgcgccccaccaccggcccaccgcgccgactccaccgaggcttcaacaagcgacgtggcgaccggcccagacgacgtcgtctcagccgccggcatcctcctcgtcgtcgtccgtctccgtaagggccagggaaggagtggtgcttctgaggaggccgagcgatcaggccaagggaggcaatgccggcacgagacaagagcgcaagagcaagggcggcaagaacgtggcgtcgtcggcgtcggcgccggcgtcctcgtcgaccccgacagcgtccgggaagcaagcccagaaaggtgccgggagcagcggcggcggtggtgctggcggtggcggcgggaactggaaaggacgaaagagcggctgggaggcgcgcttcctgttcaaggatcccgagtccgccggcgacgccgacacgcagtcgtcgccggcttcggagagggacacgaggaccaccgtcatgatcaggaacatacccaacaagtacagccagaagctgctcctcaacatgctggacaaccactgcatccaatccaacgagtggatcgcggcgagcggcgaggcgcagcccttctcctcctacgatttcgtctacctccccatagatttcaacaacaagtgcaatgtgggctacggcttcgtcaacctgacctcgccggaggccgccgtgcggctgtacaaggcgttccacaagcagccatgggaggtgtacaactcgcgcaagatctgccaagtcacatacgcgcgcgtacaaggcctggacgcgctgaaggagcacttcaagaactccaagttcccgtgcgacagcgacgagtacctgcccgtggcgttctcgccggcgcgcgacggcaaggagctcacggaaccggtgcccatcgtgggccggtcgcccgcgtccggcgcgtcgtcgcctcccaagagccgggcggccagcgtggacctgcttgggcaggagctgatgccggcgccgtcgtcgtccgcggacggcgcgtcgtcgaccaccacgtccacccacgcgctgtccgaacacgccgacgacgacgacaacgacgaagacatcaggctcgccggcgagctgcggcgcctaggctacgccgactag

SEQ ID NO: 265 - protein, 666 aa, Sorghum bicolor
MEGGGGSGIGGFPGAPGNLLDAAAQEFHPTVCAPYPLQPLPHQLYCPHTYPAMPPPPQMAMLQPVPPMAMPMAPQPGYTLPTTAPVVDGPSSRVVVLCLVPPHAQERDVAQAMAPFGAIRSADACAVASEGVATVHFFDIRAAELAVACVREQHMRQQSRLGQLYAAAAVPPAWAPAPPTAPQAWDWPHPNDDGRGLVLGQVVWAHFAPGADDGENRGSLVVLSPLPGVSVADLRQVFQAFGDLKDVRESAHRPSHKFIDFFDTRDAARALAELNGQELFGRRLVIEFTRPSGPGPRRRGYAPHHRPTAPTPPRLQQATWRPAQTTSSQPPASSSSSSVSVRAREGVVLLRRPSDQAKGGNAGTRQERKSKGGKNVASSASAPASSSTPTASGKQAQKGAGSSGGGGAGGGGGNWKGRKSGWEARFLFKDPESAGDADTQSSPASERDTRTTVMIRNIPNKYSQKLLLNMLDNHCIQSNEWIAASGEAQPFSSYDFVYLPIDFNNKCNVGYGFVNLTSPEAAVRLYKAFHKQPWEVYNSRKICQVTYARVQGLDALKEHFKNSKFPCDSDEYLPVAFSPARDGKELTEPVPIVGRSPASGASSPPKSRAASVDLLGQELMPAPSSSADGASSTTTSTHALSEHADDDDNDEDIRLAGELRRLGYAD

SEQ ID NO: 266 - DNA, 1328 bp, Vitis vinifera
atgacacccaaacagcagaagtggtttgtagagttctttgataccagagacgctgctagagctttttcagagctggatggaaaggaaatttatgacaaaaaacttataattaaattcagctgctcaggtggctatggcagaataaagtccagtactgcagctgcgacggccaccaccagttacaatgacattaactcaagaaaaattattcattcaagaacagccctatgctcgccacatgttactggaggtatattacaaagttgtcgctcaagctcagttgctccttctgcttcagtacacctttctcaagccttactgcctacaaaaagacccaccttcaggacagagaacagtagtaggaagggcattggaaggtcaaattgtggatcaatagctccaatttcctcattgtccttgggtgaagatgggagtgaatgtaccaaatccagtgggaaattcttgagaaaagtgaattacagccatcaaaaggtacccacagtcaagcaacccaggaagagggggcaaaagaacccggattctcactttttgatcaatgttgatgctatagctgagtccaattcgagagacacccggaccactgtgatgatcaagaacatacccaacaagtacagtcagaaactgcttttgaatatgctagacaatcactgcatcctctctaatgagaagattacaggagatgatgagcccttgtcttcctacgacttcgtctatcttcctattgatttccataacaaatgcaatgtgggatatggatttgtgaatcttacgtctccccaagctgcatggagactctataaggctttccatttgcaacagtgggaggtctttaactccagaaaaatttgtgaagtcacttatgctcgcttgcagggtttggaagctctgaagcagcacttcaagaactcaaaatttgcatgcatggtggacgactaccttccagtcatgttttctccaccccgagacggcaagcaaatgtccgagccagtgcctgtggttggctgctccatctctggcatcagccatggaagacatgaggagaaggttgatggggaaatggttgaggaagttaatggtgataatggtgattgtagctcaaatcccagcagcaaacatgatgatgaatagtgaagccaattcccatctcagattgacctcaattacatgctctactgcacttacttggtcatacaataggtcattaatgttgggcacaagtgccggcattggatctctgagctgttactctctcaacaatcgaatgctttcttggttatggcttctaatcgtgtaagataagatctctt

SEQ ID NO: 267 - protein, 382 aa, Vitis vinifera
MTPKQQKWFVEFFDTRDAARAFSELDGKEIYDKKLIIKFSCSGGYGRIKSSTAAATATTSYNDINSRKIIHSRTALCSPHVTGGILQSCRSSSVAPSASVHLSQALLPTKRPTFRTENSSRKGIGRSNCGSIAPISSLSLGEDGSECTKSSGKFLRKVNYSHQKVPTVKQPRKRGQKNPDSHFLINVDAIAESNSRDTRTTVMIKNIPNKYSQKLLLNMLDNHCILSNEKITGDDEPLSSYDFVYLPIDFHNKCNVGYGFVNLTSPQAAWRLYKAFHLQQWEVFNSRKICEVTYARLQGLEALKQHFKNSKFACMVDDYLPVMFSPPRDGKQMSEPVPVVGCSISGISHGRHEEKVDGEMVEEVNGDNGDCSSNPSSKHDDE

SEQ ID NO: 268 - DNA, 1659 bp, Vitis vinifera
atgggagagacggggacctctaggtttctgggaaacttagacccaagtgcgcaggagttcaggccgaggaacccatatatccagaaccagatgagcttgtctgtaccaacccaaatttactatccatacacacatccacacccacaatttgtagcttcatcggcgtacgtgagacctatcgccggaaagccgcctctctctccgctgatgtcgcctttgtcggcaacacctactagggcgctactattgagttcggtgccgacggacgtgagcgaggtgacagtgagaagagaattggaggcctttggagaggtgaggtcagtgcagatcgagagagtgtgtgatggaattgtggctgttagtttctatgatctaaggcatgcacaagcgtgtttgacggaggtacgagaacaacacatgcaacaacaaacttctcaagtggagcatttgcttgtcccactaccaccgccggcacgtgggcttattgcaggtcgtgcagtttgggctcaattcatgattccagtgagcacttgcatgctggacgactataatcaaggaactcttgtgattttcaatttggactcagaggtctccaccagcagtctgagggacatattcgagacatttgggtcaataaaggaattgagagagacaccattaaagcggcaccagaggtttgtggagttttttgatatcagagatgcagctagggctcttagagaaatgaatggcaagaaaattcaagggaaacgtgtggtaatagaatttagtcggccaggtggtcatggctggaggttcttcaatgccattaagaaaagctcacatttcaatgtgcctcctcattcttatctctctcaaacacatcattccacaaaaaagtccaatgttggtataaacaaaaggactcaaagaaatcggccgtggaagggaagacagaagaacatcgattcctgttttctaataaacgaggatgccaaaacggaatcccattacagagattccagaacaactgtcatgatcaagaacatacccaacaagtacagtcagaagctcctaatgaacatgttggataatcactgcattgactgcaataagcaggttcccgacggaggggaccaaccattgtcctcctatgatttcatatacctccccatcgatttcaacaacaagtgcaatgtgggatatgggttcgtgaacatgacgtcccctcaggcgacatggaggctctacaaggcctttcatcttcaatcttggaaggttttcaactccaccaaaatctgtgaagttacttatgctcgaatccagggtttggaagcattgaaagagcacttcaagaactcaaagttcctgtgcgacacgaagacatacctaccagtggtgttttcaccgcctcgagatgggagacaactgacagagcctcaacccattgttggcaacaataagctcatcatcggtatcatcaccaatgacactaaagcttctgatgacaacgatgatggtgatgaatgggagatgatgatggacggtcctcataggctgaataatggtggtcacgtccgcgattatgatgatgatgttgaggattacaatgaccacaatcaaagtccaaacgatgacgatagtggcgatgatgatgatagcactagtgttagtgcctaa

SEQ ID NO: 269 - protein, 552 aa, Vitis vinifera
MGETGTSRFLGNLDPSAQEFRPRNPYIQNQMSLSVPTQIYYPYTHPHPQFVASSAYVRPIAGKPPLSPLMSPLSATPTRALLLSSVPTDVSEVTVRRELEAFGEVRSVQIERVCDGIVAVSFYDLRHAQACLTEVREQHMQQQTSQVEHLLVPLPPPARGLIAGRAVWAQFMIPVSTCMLDDYNQGTLVIFNLDSEVSTSSLRDIFETFGSIKELRETPLKRHQRFVEFFDIRDAARALREMNGKKIQGKRVVIEFSRPGGHGWRFFNAIKKSSHFNVPPHSYLSQTHHSTKKSNVGINKRTQRNRPWKGRQKNIDSCFLINEDAKTESHYRDSRTTVMIKNIPNKYSQKLLMNMLDNHCIDCNKQVPDGGDQPLSSYDFIYLPIDFNNKCNVGYGFVNMTSPQATWRLYKAFHLQSWKVFNSTKICEVTYARIQGLEALKEHFKNSKFLCDTKTYLPVVFSPPRDGRQLTEPQPIVGNNKLIIGIITNDTKASDDNDDGDEWEMMMDGPHRLNNGGHVRDYDDDVEDYNDHNQSPNDDDSGDDDDSTSVSA

SEQ ID NO: 270 - DNA, 2450 bp, Zea mays
gagtctctctccgaatatgcagaagtattgtaaagctgtactaataacaatcttattttaatgtaaagaacgagcgcatgacgaaccacgaattgatagtcccctgcatgccctttcccctcccagcagtcctagctaagcctaagctagctatagctccaagtttcaaagaaacaagtagtaggaaacttcaaaccaaaatccaaaagaacacgactccacacctgctgtgcgcagcgtctacgaaccaacgaacatcagctcacttttgcttctccaaagtcaagtcccagtccacttcacttgcttcgcctgcgcgtgcaggagcgagcgctacggatctgtgaaaagcttggccgaagtcactactgcctccgcgcttctcgaagcgacgccacgccatgccgatcgttgctgagctaggcgtcgcccgcctagctgcagctaggatcggagccagctagtcgtcgtagccaagccgccgcagctcgcctgcgagcctgatgtctccctcctcctcctcctcgtcgtgttcggacggcgcgtgggtggacgtagtggtcgacgacgcgccgtccgcggatgacgacggcgccggcatcagctcctgcccaagccggtccacgctagccgcccggctcttgggaggcgacgacgcggacgacgccgcgggcgagcggcccacgatgggcactggatccgtaagctccttgccgtcgcgcgccggcgagaacgccacgggcaggtactcgtcgctgtcgcacgggaacttggagttcttgaagtgctccttcagcgcttccaggccttgtacgcgcgcgtatgtcacttggcagatcttgcgcgagttgtacacctcccatggctgcttgtggaacgccttgtacagccgcacgcgagcctccggcgatgtcaggttgacgaagccgtagcccacattacacttgttgttgaaatctatggggaggtagacgaaatcgtaggcggagaagggctgctcctcgccgctcgccacgatccactcgttggattggatgcagtggttgtccagcatgttgagcagcagcttctggctgtacttgttcggtatgttcctgatcatgacggtggtcctcgtatccatctccgaagccggcgttgcttgcgtgtcggcgccgccgccggcctcgggctccttgaacaggaagcgcgcctcccacccgctctttcgtcctttccagctcccgccgccgctgctcccgacgcctttctgggtttgcttcccggacgctgtcggggtcgacgaggatgccgccgccgccgccaccacgatcttgccgcccttggtcttgcgctcatggctcgttccggcattgcctcccttggacgactggtcgctgcccgcgctagacttacaggagctcctcctcagaagcaccactccttccctcgcccttacggaaccggacgacgacgaggatgccggcggctgagacgacgtcggttgggacggtcgccacgtcgcttgaagcctcggcggagtcggcgcggtgggccggtgctggtggggtgcgtacccgcgcctgcggggcccggggccggaagggcgcgtgaactcgacgacgaggcggcggccgaaaagctcctggccgttgagctcggcgagcgcgcgcgcggcgtcgcgcgtgtcgaagaagtccacgaacttgtggctgggccgctgcgccgactccctcacatccttcaagtccccgaaggcctggaagacttggcggaggtcagcgaccgagacgccgggcagggggctcaggaccaccagggagccgcggttgtcgccgtcgtcggcgccggtggcgaagtgggcccacacggcgtgcccgaggacgaggccgcggccgtcgtcgttggggtggggccagtcccaggcctggggcgtcggtgcaggagcccacgccggggctacggcggccgccgcgtagagctgcccgaggcggctctgctggcgcatgtgctgctcgcggacacaggtcaaggcgagctcggcggcgcggatgtcgaagaaatggacggtggccacgccctcggacgccaccgcgcacgcgtcgaccgagcggatcgcgccgaatggcgccatcgcctgcgccacgtcggcctcctgcgcgtgcggcgggacaaggcccagcaccacgacgcggctcgacgggccattgaccaccggcgtcgtcgttggcaaggtgtaccccggctgcggcgccatggccatcgccatcggaggcactggctgtaacatggctatttgcggcggcggaggcaccggcatggctggatatgggtgggggcagtatagctgttgcggaagcggctgtagaggatagggggcacagaccgtagggtggaactcctgagctgcggcatcgagaaggttacccgtggcttccgggaacccacccattccactccctcccccaccc

SEQ ID NO: 271 - protein, 656 aa, Zea mays
MGGFPEATGNLLDAAAQEFHPTVCAPYPLQPLPQQLYCPHPYPAMPVPPPPQIAMLQPVPPMAMAMAPQPGYTLPTTTPVVNGPSSRVVVLGLVPPHAQEADVAQAMAPFGAIRSVDACAVASEGVATVHFFDIRAAELALTCVREQHMRQQSRLGQLYAAAAVAPAWAPAPTPQAWDWPHPNDDGRGLVLGHAVWAHFATGADDGDNRGSLVVLSPLPGVSVADLRQVFQAFGDLKDVRESAQRPSHKFVDFFDTRDAARALAELNGQELFGRRLVVEFTRPSGPGPRRRGYAPHQHRPTAPTPPRLQATWRPSQPTSSQPPASSSSSGSVRAREGVVLLRRSSCKSSAGSDQSSKGGNAGTSHERKTKGGKIVVAAAAASSSTPTASGKQTQKGVGSSGGGSWKGRKSGWEARFLFKEPEAGGGADTQATPASEMDTRTTVMIRNIPNKYSQKLLLNMLDNHCIQSNEWIVASGEEQPFSAYDFVYLPIDFNNKCNVGYGFVNLTSPEARVRLYKAFHKQPWEVYNSRKICQVTYARVQGLEALKEHFKNSKFPCDSDEYLPVAFSPARDGKELTDPVPIVGRSPAASSASSPPKSRAASVDRLGQELMPAPSSSADGASSTTTSTHAPSEHDEEEEEGDIRLAGELRRLGYDD

SEQ ID NO: 272 - DNA, 702 bp, Arabidopsis thaliana
atggaaacgaaaaaacccactaaatctttaaacccatacgcaccggcgtttactcctccttctcgttctcctcctttgtttaactttaacaagccatttccttgttacaacaagccttttaaagctattaccggcgctcatgttaagccggaaaaaaaccctttcgtccgttatgggttttgtcaccggagatgtctcccaccaaggcttttgaagaagcctttaccggaaaataagctcgccggaagaacctcggtcatggttaagaatatacctaactgtctcggacgaatggatctcttgaggattttggacaatcattgtcggaaacacaatgaaaaatcttcctacgactttctttatctgcctatggattttgggaaacgagccaatttgggttacgccttcgttaacttcacgagctctctcgcagcggagagattccggagagaatttgaaaacttctcttgggacaatatcgggttcaggaagaagatttgcgaaattacagtggctaagtatcaggggaaagaagagctgactcgacatttcaggaactcaaggtttacttgccacaccgacgattatctcccggtggttctctcgcccccgagcaacggcttcacggcttatactctcacaaaacttggttaccgagtcggcgcacttggtggtggttcacgaaacgcttcattgcgttaa

SEQ ID NO: 273 - protein, 233 aa, Arabidopsis thaliana
METKKPTKSLNPYAPAFTPPSRSPPLFNFNKPFPCYNKPFKAITGAHVKPEKNPFVRYGFCHRRCLPPRLLKKPLPENKLAGRTSVMVKNIPNCLGRMDLLRILDNHCRKHNEKSSYDFLYLPMDFGKRANLGYAFVNFTSSLAAERFRREFENFSWDNIGFRKKICEITVAKYQGKEELTRHFRNSRFTCHTDDYLPVVLSPPSNGFTAYTLTKLGYRVGALGGGSRNASLR

SEQ ID NO: 274 - DNA, 849 bp, Arabidopsis thaliana
atggcttcttccgatgatccagctccggagaacaaccacgtctccgtcttagctagacaagctcgaaacccaccgacacattttttctttcctcacaatccttctcctcgtacttactacttctcggcgccaccacagatttatttcatctccgacatatatctccctcctcctccatcaatatgggtgtattatcctctttggtatattaaccctaaccctaatgtatatgagtctacacaagaacttcctcaacgttactctccaaaccctagccaagagatgactcttccaccgactagtagtagaagagtttttggccggagaagttacgaactatgtgagaaggtgacatggaggacaagtatcaagccggaagttgaatccaacggtgatcacatcacaaccgtcatgcttcgcaatataccgaaccgatacacgagagagatgatgattcagttcatggataagcattgcgaagaagccaataaaagtgggaaaaatgaagagtttacaatctctgcttatgattttatttaccttccgatagactttaggactacaatgaacaaagggtatgctttcgtgaacttcacaaatgcaaaagcagtgtccaagtttaaggctgcttgcaacaacaagccgtggtgccatttctactcaaaaaaagaacttgagattacttatgctagaattcaggctaatgagctggtgaaacgtttccagcatatgacatatccggaggaggcctacagtgcggtatgtttcagcccagctcgtagcggagggaaagatacagttcaaaccacaatggtcggtaaatgcaatgaaccagtgtgctcggtttag

SEQ ID NO: 275 - protein, 282 aa, Arabidopsis thaliana
MASSDDPAPENNHVSVLARQARNPPTHFFFPHNPSPRTYYFSAPPQIYFISDIYLPPPPSIWVYYPLWYINPNPNVYESTQELPQRYSPNPSQEMTLPPTSSRRVFGRRSYELCEKVTWRTSIKPEVESNGDHITTVMLRNIPNRYTREMMIQFMDKHCEEANKSGKNEEFTISAYDFIYLPIDFRTTMNKGYAFVNFTNAKAVSKFKAACNNKPWCHFYSKKELEITYARIQANELVKRFQHMTYPEEAYSAVCFSPARSGGKDTVQTTMVGKCNEPVCSV

SEQ ID NO: 276 - DNA, 1011 bp, Medicago truncatula
atggctttaaacgcagaagctccagagttttttcctaactacaaactacaaaatcctcaatctcactgctaccttttctctactctccctcatcgtctacatccttatttctattactaccctagtgcttataaacatccatttcctttccactttcatccacttccaaaccacctacccacttttcctaggtttgaatccgaagctaaactaccgacccattttcatggcagttttgaaaaccatgaacaagtgctgaaaaatgacatggtggtggagccatttatcgagggtgatgattcaaacaatgtttttcatgaggttgtaagtggtggtgaaatggaacaccgtcgttctcatggggtcagatccggaggtcgtcttgagtggaggaggaagagaggacgcaaggatgttgaacaaaaagagaagaaagttaatgagaaacctttgctgagaaacaaccgctacggccatgcaaaaaatattcgttatcattgtcacaagaagaatagtggaggtggttttccattggttccggttcagaaggatggtaaagaaacaacggttatgattaagaacattcctagcaaatatactcgagataagttgttggatttcttggaggagttttgcatgcgtgaaaatgccaaagatcaagccaatggtgaagaaagtacttttgcttttaatgccgtatacttgcctattgatttttgtactgagttaaacaaaggctatgcctttgttaatttcaccaagcatgaggcagcttggaaatttcaactgacagcctctgggaagaactgggaacacttcaattccagtaagatatgtgatgtggttgctgcacgcctccagggaaaagagaagctagagaatcattttggaagcatggtttttccctattcgtccgaggaagttctgccactgttcttcagtccacctcgggatggtgtgaccaaaggaaaccagaggacaatgggaaagcttcttaagccttattattag

SEQ ID NO: 277 - protein, 336 aa, Medicago truncatula
MALNAEAPEFFPNYKLQNPQSHCYLFSTLPHRLHPYFYYYPSAYKHPFPFHFHPLPNHLPTFPRFESEAKLPTHFHGSFENHEQVLKNDMVVEPFIEGDDSNNVFHEVVSGGEMEHRRSHGVRSGGRLEWRRKRGRKDVEQKEKKVNEKPLLRNNRYGHAKNIRYHCHKKNSGGGFPLVPVQKDGKETTVMIKNIPSKYTRDKLLDFLEEFCMRENAKDQANGEESTFAFNAVYLPIDFCTELNKGYAFVNFTKHEAAWKFQLTASGKNWEHFNSSKICDVVAARLQGKEKLENHFGSMVFPYSSEEVLPLFFSPPRDGVTKGNQRTMGKLLKPYY

SEQ ID NO: 278 - DNA, 1170 bp, Oryza sativa
atggcggtgacaaagctcaacccatcagcggcgccgttccactgctcccgccgccacctgttcttcgcgccgccgcctcctcctcctcctcccatgccggcgtaccagtaccacgccacgggcgcgtgcgccgcggcggcgccgccacctttccccttcttcgccacctactcctgcgcctcgctcccgttccacggtcacctctacccaccgtgcgggtaccaggcgcagatggggcctgcgccgccgggcgcggcgttcgccaagggcgtcctcgccgcggcgccgccgccgccgcacggccgccctccgcacaagctcatggtgtgcaagggcgcccccacggtcaccgacgtgaagctgcgcgcgcaggcgcgggcggcggcgcgtgtgggcgttgccgccgccgtgcgggggtggcgaccggcgccggccaccgcggggcctccccggatgctggtggccgccgcgccatgcgggatgctgcacccggccgccgtggcgaggcggcggggcatgagcaaggtgtacaagccccggaagccgcagcgcgccgggagggagcggtcgccgtcgccgtcgccggtgttcacgacgaggccgatgtcgccgacgccgccgatgcagaagctgaagccggcgcacaccaccgtcatggtgcgcaacatccccaacaagctcacgcgctcggacatggtgcggctgctcgacgaccactgcgcccgcgagaacaggcggcgcggccgcggcggcgagccgcgcgcggagtacgatctcgtctacgtccggatggatttcgggatgtgcaacaaggagaggagcagcaacatgggctacgcgttcgtcaacttcacgacggcggaggcggcccgcgggctgcagcgcgcgctccacggctgccgctggaagcgctccgccttcgactccggcaagatcatcgacatccgcgccgcgcgtatccaggggaaggacgcgctggtgaggcactttgggcggacgacatactacgagtgcgacaccgacgagtacctcccggccgtgttctcgccgccgcgtgacgggtccaccgccggcgccggcgcgccgtcgccgccggcggtcaagaccgtcggcatccgtgtgccccctcggccgatcacgctgctcacccaccgcggcaacgtcaactga

SEQ ID NO: 279 - protein, 389 aa, Oryza sativa
MAVTKLNPSAAPFHCSRRHLFFAPPPPPPPPMPAYQYHATGACAAAAPPPFPFFATYSCASLPFHGHLYPPCGYQAQMGPAPPGAAFAKGVLAAAPPPPHGRPPHKLMVCKGAPTVTDVKLRAQARAAARVGVAAAVRGWRPAPATAGPPRMLVAAAPCGMLHPAAVARRRGMSKVYKPRKPQRAGRERSPSPSPVFTTRPMSPTPPMQKLKPAHTTVMVRNIPNKLTRSDMVRLLDDHCARENRRRGRGGEPRAEYDLVYVRMDFGMCNKERSSNMGYAFVNFTTAEAARGLQRALHGCRWKRSAFDSGKIIDIRAARIQGKDALVRHFGRTTYYECDTDEYLPAVFSPPRDGSTAGAGAPSPPAVKTVGIRVPPRPITLLTHRGNVN

SEQ ID NO: 280 - DNA, 972 bp, Oryza sativa
atgtcttgcctctctcgcctcaacgcctcggcggcgccatgggagccgccggtggcacgcgccatggccgtcgagcagtactgcccgccgccacagtccttgctcccgccgccgccgctgccgccggtcgccgttcccaccacctgcggttgcgccgcctgcctccagggctgcttcgttccggtgggggttcaagctgccttcccgcacgccgctgctgggtgcgcgccgccgccgccggtgatgccggtgatgatagtgtaccgcgtcgtgcagcctccgccgccggcagctcacgccacgcgctgccagatcacggagatcgaggacggcggcggcgtggagaccgcgaaagctgtggacggcgacgagccgcagccgttcatccgcacggtgcgcagcactcgtcgcagaaaggcggcggcgatccgccttcccaaggcttttcgagcggcgcttttgccgccaccgccgccgccatgcgcgttggggttcacagctactactacctccttgatgataaggaacatccccaataagttcctgaaggcgaggctgatggctatcctggaccagcactgcgccgacgagaacggcaagtgtcaccgccgcggcggcggcggcggccgcagcgtcgtgaagtctgaatacgacttcttctacgtacccatcgacttcaagactgggttcaacaaggggtacgccttcgtcaacatgacgacggcgaccgcggcgcggcggctccgcgcgttcctccaggaccaccgctgggacgccgccatgtccggcaaggtctgcgacgtcgtgcccgccgccatccaggggctcgacgcgttcgtggcgcacttctcggcgtcgtgcttcccctgccgcaccaaggagttcctgccggtgtggttcgagccgccgcgcgacggcgagcagcagacgaaggcgcacgtggtcggccgcctcgtcgtgcgcccacgctag

SEQ ID NO: 281 - protein, 323 aa, Oryza sativa
MSCLSRLNASAAPWEPPVARAMAVEQYCPPPQSLLPPPPLPPVAVPTTCGCAACLQGCFVPVGVQAAFPHAAAGCAPPPPVMPVMIVYRVVQPPPPAAHATRCQITEIEDGGGVETAKAVDGDEPQPFIRTVRSTRRRKAAAIRLPKAFRAALLPPPPPPCALGFTATTTSLMIRNIPNKFLKARLMAILDQHCADENGKCHRRGGGGGRSVVKSEYDFFYVPIDFKTGFNKGYAFVNMTTATAARRLRAFLQDHRWDAAMSGKVCDVVPAAIQGLDAFVAHFSASCFPCRTKEFLPVWFEPPRDGEQQTKAHVVGRLVVRPR

SEQ ID NO: 282 - DNA, 1241 bp, Populus trichocarpa
ggtcttcactctctgtaatcaattgcttccatgtttcctactgatggaaacagtaccagcctgaatccagaagcacctgagttctttcctcatagttaccttgaaaacgacatggttgcaccttcgcataatgttgttaactatactgaccaagatctcccaaatttctcgtttcttcctgcaataaatcaaaacccatcttcttattactactaccactgctactctacatcagggccatcttctcatccttatccttactatactgacaccgattatcaatatcctagcaatgcacagtactgcgttacgtatgctcacaaccataacctcttggtctctacagtactgaccaagccaagccctatcatggcagtctctgaggaaatgcaagcccaagatgagcccaaaaaggacatgcaacagttggtgactgcaagggttagcacaggaagtaaaaagagaggagagtgtagcagatatgttggttcttttaatgggagagaagggaggtatagagggcacgaaaaaaaacatgccaagaaggaatatttgagagccaagtctagtggaagtagtagaaatcgcgagaggcaatattcttccaccggaaggaatgtgagatcttgtggtggtgccaattctaggcagaagcattctgtgttccctgtgctgcccgatggccaagataccacagttatgatcaggaacattcccaatagatacacccgtgaaatgttaatggaattccttgacagacattgcatgatggagaatgaaaaggcaaagaagcatcaaaattctgactctgccaaggaggcaattgtgtcagctttcgatttcctgtatctgcctattgacttcgaaagagaggccaacaaaggctatgcttttgttaacttcacagatgcaagagctgcgtggaagttttacctttccaccaaccatcaagcatgggatgtattccagtccagcaagatacgtgagatagcctgtgctaggctccagggaaaggagcagctagtgaggcattttgagaagtcaacttttgaatgcgactctgatgagtatttaccagtaagtttcagcccagccagagatggttcaagggcagtggtggagcaaagggcagtgggtagacgtattagtaacaaaatctagctatgcggcctagctattagatatggtgaccaggacgtgacaagaacaagattgtgtgcttttgtcattgtcattttgtg

SEQ ID NO: 283 - protein, 376 aa, Populus trichocarpa
MFPTDGNSTSLNPEAPEFFPHSYLENDMVAPSHNVVNYTDQDLPNFSFLPAINQNPSSYYYYHCYSTSGPSSHPYPYYTDTDYQYPSNAQYCVTYAHNHNLLVSTVLTKPSPIMAVSEEMQAQDEPKKDMQQLVTARVSTGSKKRGECSRYVGSFNGREGRYRGHEKKHAKKEYLRAKSSGSSRNRERQYSSTGRNVRSCGGANSRQKHSVFPVLPDGQDTTVMIRNIPNRYTREMLMEFLDRHCMMENEKAKKHQNSDSAKEAIVSAFDFLYLPIDFEREANKGYAFVNFTDARAAWKFYLSTNHQAWDVFQSSKIREIACARLQGKEQLVRHFEKSTFECDSDEYLPVSFSPARDGSRAVVEQRAVGRRISNKI

SEQ ID NO: 284 - DNA, 1391 bp, Populus trichocarpa
ataatatcactttggacattttgttcttaaatggctgttaacgcaccaaaccctaaacctttgaacccttcggcttccccttacacgagagccgaagcaagtgtgtcttcgccatttctaccaccaaacagtggaatgatcgtgttaccctcaaaactaccccagctttcacaagagatttatggctcccatccacaacagttgcaatctcaactagcgtgggtgactcgatcagtgcccaacatggttcctgggttcctcgccaatccctacctctccgtgcaacaccagttgacccaagcttgggtgtaccaagaagccactgcctactacaacgtctataggcagcctttcactgtgccctatccacatctttattacagtgacagtggaaaccaaggaacatgctgtacccccggtgagaatttaaaagaatccgaggctgtcaaatttgaggaaagagtgaaatgtgaggattgctattctggggttttgggcaacgtggaaaagagggtttttggtggaggtgccaggaggtttgttgcacctcctcgtttaagggcaaagcgaagagatggtggggtttttttgggggagaaattatgggtgcctaagactgaatctaagctgtatggggagagtagtggtgatgatcaggggttgagtgttaaggaggaggatggggtactttcttgtagtaccgatgaagtttttttagcaggaaaaactactttaatgatcaagaatattccaaatcaacttggaaggcatgatttactgcgaatactggacgtgcactgtttgggagagaatcaaaaggctatgcagcgatttgatcgtgttaaatcagagttcgattttttctacttgcccatggactttgtgagacgagcaaatctgggttatgcgtttgtcaacttcacgaatgcagctggagccttgagatttcgcaaagctttcaataagtacaagtgggatgtcggtgcaaaccgcaagacatgtgaagtatctttggcaactatccagggaaaagatgccctctgcaatcgctacaagaattctgtgtttccatgtcataccaatgcctatttgcctgttgttctactgcctgcacgtgatgggtggaggcagaccgcacctagtattgttggaaggcgtgtagacccagcttttccattggaaagaggttgtttcagtcggaggaaatccttgaacaagattgctgaagatggacggtcaaaatcaatgggtgaattggaaacactggcatgggatttcgatgtgtttgtttccaggacaatcccgtcataaatgttgtatgaagtttgcttgatgttccagtacaccttgtggttttttaggtcccatgctttcctatcatcgcgttttag

SEQ ID NO: 285 - protein, 426 aa, Populus trichocarpa
MAVNAPNPKPLNPSASPYTRAEASVSSPFLPPNSGMIVLPSKLPQLSQEIYGSHPQQLQSQLAWVTRSVPNMVPGFLANPYLSVQHQLTQAWVYQEATAYYNVYRQPFTVPYPHLYYSDSGNQGTCCTPGENLKESEAVKFEERVKCEDCYSGVLGNVEKRVFGGGARRFVAPPRLRAKRRDGGVFLGEKLWVPKTESKLYGESSGDDQGLSVKEEDGVLSCSTDEVFLAGKTTLMIKNIPNQLGRHDLLRILDVHCLGENQKAMQRFDRVKSEFDFFYLPMDFVRRANLGYAFVNFTNAAGALRFRKAFNKYKWDVGANRKTCEVSLATIQGKDALCNRYKNSVFPCHTNAYLPVVLLPARDGWRQTAPSIVGRRVDPAFPLERGCFSRRKSLNKIAEDGRSKSMGELETLAWDFDVFVSRTIPS

SEQ ID NO: 286 - DNA, 1044 bp, Sorghum bicolor
atgtccgccacgaagctcaacccgttcgcggcgccgttcccatgcccctaccccctcgcgccgccggcgccgcccccgttcccgctcgccgacgcctgcccgccgcggttcccattcgtcacctactgctgcgtcgcctccccgcagggccacctcggcctcggcttctgctttcccgtgcagcagtgctcctccccgccggccctccgcaagggcgtccccgcggcgccgccgcacggcctcccgccgcacaagctcatggcggcgttctccggcccctgcagagcagggaagcagcgccaggccctgcccccagtgcctatgaagccggtcgcctctgccgccgcagccgacgccgcgcctgcccaggtgccggcggcgaagcgcaagccgcggatggcgcggctgctgaaggcggagagctggagccaggctaaggcgccgcggccacggaaggcgcggggtccgcgcgcgcgcctgaccgcgcagcgtgaggcgccgccgacgtccctctacacgaagcggccgcgggattgggtgaagccggagccttcggagctcggcgactgcaccaccatcatgcttcgcaatatccccaacaagctcaggagcggcgatatgatcagtttgctcgacgagcagtgcgcgcgcgcgaacagggccgccggcgtcgttgtcgcagcgtacgacgtcttgtacttgccgatggacttcaggaaagaggccaacttcggctacgcgttcatcaacttgacgactacggcggcagccaaggagctctactgctccctgcaaaactgctgctggaaagtgcacggctccaagaaggtgatcaacatcgaccgggccacgcagcagggcaaggcgatgctggtgaggcatttggagaagatgaggctggagcgcgccaaggacgagttcctgccggtggagttctccccgccgcgcgacggcgtcaacgtccccgccgcgcccaggcgcatccgcatggctcgccggcggggcgcccgcaccgcatccaaggccaaggctatctctagctag

SEQ ID NO: 287 - protein, 347 aa, Sorghum bicolor
MSATKLNPFAAPFPCPYPLAPPAPPPFPLADACPPRFPFVTYCCVASPQGHLGLGFCFPVQQCSSPPALRKGVPAAPPHGLPPHKLMAAFSGPCRAGKQRQALPPVPMKPVASAAAADAAPAQVPAAKRKPRMARLLKAESWSQAKAPRPRKARGPRARLTAQREAPPTSLYTKRPRDWVKPEPSELGDCTTIMLRNIPNKLRSGDMISLLDEQCARANRAAGVVVAAYDVLYLPMDFRKEANFGYAFINLTTTAAAKELYCSLQNCCWKVHGSKKVINIDRATQQGKAMLVRHLEKMRLERAKDEFLPVEFSPPRDGVNVPAAPRRIRMARRRGARTASKAKAISS

SEQ ID NO: 288 - DNA, 1053 bp, Vitis vinifera
atggcttctcagcttctcaacacaaaccctagagggtcgaaacccttaaacccaaacgcacatgctttccagccatggaaatcattgaaagcttattatcttccacatcacttgtacgaaacacaggaaaggatgcaactgccggcagcggcgacggtgctggatttcgcttatcagcctgtttccttgccactgttgagatattccggtttgggttgctacagtgcacagtttcatcatcaaccgctgcacctgcgagcttcttccattctttaccctagtggcgactttcccattacctatgtgggttctacgaaagattcggtcactgaagtgatggaggatttgggggattcggtgtcttcgagaggtgagacaaggaaagtaagtggggttccgatgaagaagatgattgcaccgagattgaaaaggtcgcagaggaggagttctatggcaggcggggacaaaaatgggacctctgtttggagggccagaaagtttttgaacggtgatggttgtggagatgatcctttgcctccctctgatgtcaatgcctttgaactttctctatctgggaaaactactgtgatgattagaaatattccaaacaaaatgagtaggaaagatatgctacaattactcgatgagtgttgccaagtagagaacagaaacgcggagttgcgatgtgactcgcttcgtactgagtatgactttgtctacttgcccatggattttaggtttaagtgcagcaataagggctacgcatttgtgaacttcaccacagatgttgccgcatttaggatctgcaaatacttgcacaacaccacatgggcggcttacgggaccaagaaaatatgtgaaatcacaggcgccagaatccagcagggaaaagaagcgctagttggacattttcggaattcgaatttcgagtgtagcacagatgattacctcccggttgttttatctcctcctcgagatggtatgaccgccataaccacaccacggattgtcggtagacgcgttgtttccaacaaatccatgaggaaacattga

SEQ ID NO: 289 - protein, 350 aa, Vitis vinifera
MASQLLNTNPRGSKPLNPNAHAFQPWKSLKAYYLPHHLYETQERMQLPAAATVLDFAYQPVSLPLLRYSGLGCYSAQFHHQPLHLRASSILYPSGDFPITYVGSTKDSVTEVMEDLGDSVSSRGETRKVSGVPMKKMIAPRLKRSQRRSSMAGGDKNGTSVWRARKFLNGDGCGDDPLPPSDVNAFELSLSGKTTVMIRNIPNKMSRKDMLQLLDECCQVENRNAELRCDSLRTEYDFVYLPMDFRFKCSNKGYAFVNFTTDVAAFRICKYLHNTTWAAYGTKKICEITGARIQQGKEALVGHFRNSNFECSTDDYLPVVLSPPRDGMTAITTPRIVGRRVVSNKSMRKH

SEQ ID NO: 290 - DNA, 3695 bp, Arabidopsis thaliana
accattcatttttttttccttgttgttgcgtaatccaactaaccgaaaaaaaccaaactctttcttttctccatttctctctctcttggagggagtgccggaatctaatcggagttatcaccggaattacggttttgcttccgtgcaaagtttttacttgctcgtttggaattcacgacgtgtccgtcagaggaagcagaatttgaaattgaagcaccgattcactttttttttgttttggaaattatatatagatataattctctctgctggttatgatgatgattggatagaaagaaacaaaaaggaaagccaaagatataagaagaactctttctctctctgtttctgtctctctgctccttttgccacgtgaagtttagagaagaagaaggtttacgagatccgtttcagtaatttttagctgcttcaatttgcttttggacgaattacgaagagaagaagcacaattgatctgctggaacaatgccatctgatatattggaaccgagaggtgtgcctacaccttctcattttcatgaagacattcgcatcactcctgagaaacaatttggtttcatgaaaaacaatccaatgcctgaaggtggtgtggatagaagttcaaatctaccgactagttcttggacatctgacagttaccagctctctcaacaatcaagcttgtctggggcgcttccctcctttatccctaatggaagaacaactacaaatgatactcactgggagagcagtctattctcaagctctctgtctgacctatttagtagaaaattacgactaccaagaagtgataagttagcctttatgtctgcaaaccgcgaggaagaaccttcagagtccttagaagaaatggaggcgcaaactattggaaatcttcttcctgatgaggatgatctttttgcagaagtggttggtgagggtgtccataagtctcgtgccaatggtggagatgatttggatgattgtgacctattcagcagtgttggtggcatggaactagatggagatgttttctcctctgtcagtcaaagagatggcaagagaggcagcaatgtttcgactgttgctgagcatcctcaaggagaaattttatccagaatactttttgttaggaatgtggatagcagcattgaagattgcgagctgggggtcctttttaagcaatttggagatgttcgggctcttcatacagctggcaagaatcgtggctttatcatggtatcatactatgatataagagctgctcagaaagcggcaagagcactccacggtaggctcttaaggggaaggaagcttgatattcgctattctattccaaaggaaaatcctaaagagaactccagcgaaggagccttgtgggtaaataatcttgattcttctatatccaatgaagagcttcacggtatattcagttcatatggagaaattagagaggttcgtagaacgatgcatgagaactcacaagtttacatagagttctttgatgttcgaaaggcaaaggttgcacttcaaggactaaatggacttgaggtcgctgggaggcagcttaaacttgcaccaacctgtccagagggtacaagtttctggccacagttcgcttcagatgatggtgaggggggtctacctaaaatggcttttaataacctatcatcagctcacatggggagacatttcccaggaatattagcttcaacctccattgatggtggatctattcgaggtatgcacaattctgttgggtcacctatgaactccttcattgaacgtcatcagagtctcgatgttcctattggtttgccaccatcggcaagagtcatctcagctagcaagcctgttggtcttcaggagtttggaaacccatttgataattcgaaaacggggatccaaagtatgccaaatctccatcctcattttcctgattaccttgacaactttgcaagcggtagtccatataaatcctctacgacattctctgaaatggtaagcgatggccaaaaagcaaatgagggctttatgatgagcaatgttcgtggagtgggagtagatggatttaatggaggtgtcataggatctcccataaatcaaggatcccatcgtggtaacctcaacttatggagtaactctaacagtcagcaacataatcagtcaagtggcatgatgtggcctaactcaccatctcgcgtcaacggcgttccctctcagcgcatcccacctgttactgcattctctagagcatctcctttaatggtgaacatggcatcatcgcctgtgcaccaccacattggatctgccccggtattaaactcacctttttgggatagaagacaggcatatgtagctgaatctccagaatcttcaggatttcacttaggttctcccggtagcatgggatttcctggctcgtctccctcacatccaatggattttggttctcataaggttttttctcatgtcggtgggaatcgcatggaggccaattcaaaaaatgctgtattacgatcatcgcgacagatgcctcacctctttactggaaggagcccaatgctttcagtgtcaggctcatttgacttgcctaatgaacgatacaggaatctctctcaccgaagaagtgaatctaactctagtaatgctgaaaagaaactgtatgagcttgatgtagatcgcatattacgtggggaagacagtagaacaacgttgatgataaagaacattcctaataagtatacttctaagatgctcctagctgctattgatgagtactgtaaaggaacatatgattttctttatttgccaattgacttcaagaataaatgcaatgtcggatatgctttcatcaaccttatcgaacctgaaaatattgttccgttttataaggcattcaacggtaagaaatgggaaaagttcaacagcgagaaggtggcatcgcttgcatatggtcggattcaggggaaatcagctcttattgcccatttccagaactcaagtttgatgaacgaagacaaacgttgcaggcctattctcttccacactgctggtccaaatgctggtgatcaggaaccatttccaatgggttcaaacatccggtcaagaccaggcaagcatcgaacaaatagcatcgagaactacaccaactttagcagtagctctgataaccgagacgaacctgcaaatgggaacgactccatgtaaccgataagccagacagttttcatgtcgtaagccagactaacccttttaggcgtcttgtatcagaggtaaaagaaaagagacccaaaagattaacacaaggtaaaatatatatatatcgttgacaaccccacagctctgtaaatccttgggggtgtggtaaattacctgagaaaactcattttgcagaggagaaagtttttgaagtcttggtccctttaaactccttcaggttacttcacaagttttgttgtatcactaaacctcccagagaaaaccttgcttgatttttttttctttttgctttctaagtttttatttttctgttttacttaaaaaattgttgggttgtgtctacaaggatctttttctttgtactttgcatacaaatgtaacaacctagtacgatgtgttcagtttcttcgcccgtggcttgggaccatataatatcatttatgtaaacccttttgagggcgaagtttttggca

SEQ ID NO: 291 - protein, 907 aa, Arabidopsis thaliana
MPSDILEPRGVPTPSHFHEDIRITPEKQFGFMKNNPMPEGGVDRSSNLPTSSWTSDSYQLSQQSSLSGALPSFIPNGRTTTNDTHWESSLFSSSLSDLFSRKLRLPRSDKLAFMSANREEEPSESLEEMEAQTIGNLLPDEDDLFAEVVGEGVHKSRANGGDDLDDCDLFSSVGGMELDGDVFSSVSQRDGKRGSNVSTVAEHPQGEILSRILFVRNVDSSIEDCELGVLFKQFGDVRALHTAGKNRGFIMVSYYDIRAAQKAARALHGRLLRGRKLDIRYSIPKENPKENSSEGALWVNNLDSSISNEELHGIFSSYGEIREVRRTMHENSQVYIEFFDVRKAKVALQGLNGLEVAGRQLKLAPTCPEGTSFWPQFASDDGEGGLPKMAFNNLSSAHMGRHFPGILASTSIDGGSIRGMHNSVGSPMNSFIERHQSLDVPIGLPPSARVISASKPVGLQEFGNPFDNSKTGIQSMPNLHPHFPDYLDNFASGSPYKSSTTFSEMVSDGQKANEGFMMSNVRGVGVDGFNGGVIGSPINQGSHRGNLNLWSNSNSQQHNQSSGMMWPNSPSRVNGVPSQRIPPVTAFSRASPLMVNMASSPVHHHIGSAPVLNSPFWDRRQAYVAESPESSGFHLGSPGSMGFPGSSPSHPMDFGSHKVFSHVGGNRMEANSKNAVLRSSRQMPHLFTGRSPMLSVSGSFDLPNERYRNLSHRRSESNSSNAEKKLYELDVDRILRGEDSRTTLMIKNIPNKYTSKMLLAAIDEYCKGTYDFLYLPIDFKNKCNVGYAFINLIEPENIVPFYKAFNGKKWEKFNSEKVASLAYGRIQGKSALIAHFQNSSLMNEDKRCRPILFHTAGPNAGDQEPFPMGSNIRSRPGKHRTNSIENYTNFSSSSDNRDEPANGNDSM

SEQ ID NO: 292 - DNA, 3886 bp, Arabidopsis thaliana
atcgaatggtccagattcaagctcataccataccactaaatccatggtacatacaacgtagcagagtccttctctccttccttccctcttttgttttttcctctccctctcattttttttgttctctaaaccaactaaccgcaaaaaccaaaaaaaccccccaaaaaaataaaaatctctctctcctctccgtttctctctctgtcggagggagtgccggaatcgcgcgtcgacgggaagaatatcgccggaaaagctcaaaaatcatcgccggtcgcacgaattattcgttggaaacaacgcgtcgtgagaggaggggaaattcgaaaagagaaagaaaaaaaattgaaaacgccgattcactttttttatatatataatataaaaaatttcttttacggaattaaatattctgtgatggatgcgattggatagaaggaaacaaaaaggaaaggaggaagataaaagagagaagaaggaattattctcttctctcttctctttcatctctgtctacatcgctgtttttttttttcttcaaggatcgtgatacctgaagaagaagaaggttttttcaggggaagtgatatggttcgttgaaataagtttaaagttttaaaagattttgattctggttttattagtcaaattttgtaagatgccgtctgatataatggaacagagaggtgtttcaacaccttcccactttcatgaagatattcatattacttcagagaggcaatttgggtttatgaaaacagacatgatgcctgaaaaccaaggtggtcgtgatagactttcaagtatgccaaagagttcctggacatctgaaagttaccagctgaagccacaatctagtttttctgggtcgcacccctctggtagccctaacgcaagaaacactacaaatggtagtcagtgggaaagcagtttattttccagctcaatgtctgatttatttagtagaaagctgcggctacagggaagtgatatgctatccactatgtctgcaaacacagttgttacccaccgtgaagaagaaccgtctgaatctttggaagagattgaggcacaaactattggaaatcttctcccagatgaagatgatctttttgcagaagtgacaggtgaggttgggcgtaaatctcgtgctaatacaggagatgagttggatgagtttgacctcttcagcagtgttggtggcatggaactagatggagatattttttcttctgtgagtcatagaaatggtgagagaggtggcaataattctgttggcgagcttaaccgtggggaaattccatccagaacacttttggtcggaaatatcagtagcaatgttgaagactatgagctgaaggtcctttttgagcaatttggagacatccaggctcttcatacagcttgcaaaaatcgtggctttatcatggtatcgtactgtgatataagggctgctcagaatgcggcgagagcactccagaataagctgttaagaggaacaaaacttgacattcgttattctatctctaaggaaaatccttcacaaaaagatacaagtaaaggagccttgttggttaataatctcgattcttctatttcgaatcaagagctgaatcgactggtcaaatcgtatggagaggtcaaagagattcgtaggaccatgcatgataactcacagatatacatagagttctttgacgttcgagctgcagcagctgctcttggtggactaaatggacttgaggttgctgggaagaagcttcaacttgtgccgacctatccagagggtacaagatacacgtcgcagtgtgctgcaaatgatactgaagggtgtctacctaaaacgtcttatagtaatacatcatcgggacacataggtagacatttcccaggaatgatttcttcaacctccagtgatggtggatctatgcgggttatacataattctattggatcacctgtgaattccttcattgaacgacatcgtagtctcagcattcctattggattcccaccttcggcaaacggcatctcagcaagtaagcctgtaggacttcaggagcatggccaccattttgataattcaaatatggggatccaaagcatgccaaatctccatcctcattctttttcggagtacgtcgacaactttgcaaatggtagtccatatacgtcctctgcattttctgaaatggtcagtgatggctcaaaagcaaatgaaggctttatgatacataatgttcgtggagtggaaggctttagtggaggcggtataggatctcccatgcatcaaagctctcgccgccctattaatttatggagcaactctaacactcagcaacaaaatccgtcaagtggcatgatgtggcctaactcgccatctcacatcaacagcattcctactcagcgcccacctgttactgtattctctagagcacctcctataatggtgaatatggcatcttcccctgtgcaccaccacattggatctgcgccggtattaaattctcctttctgggacagaagacaagcctatgtagctgaatctctagaatcatctggcttccacataggttctcatggtagcatggggattcctggctcttcaccatcacatccaatggacattggttctcataagactttctctgttggtgggaatcgcatggatgtaaattcccaaaatgctgtcctgcgatctcctcaacagttatctcatctctttcctggaaggagtccaatgggttcgatgccagggtcatttgactcgccaaatgaacgatacaggaatctctctcaccgaagaagcgaatctagctctagcaatgctgacaaaaaactgtatgagcttgacgttgaccgtatattacgtggggaggacaggaggacaacattgatgattaaaaacattcctaacaagtacacttcgaagatgcttctatctgctattgacgagcattgtaaaggaacttatgatttcctttatttgccaattgacttcaagaacaaatgcaatgtgggatatgctttcatcaatcttattgaacctgaaaagattgtcccattttttaaggcatttaatggcaaaaagtgggaaaagttcaatagcgagaaggtggcaacgcttacgtatgctcgtatccaagggaaaacagctcttattgcccatttccagaactcaagcttaatgaacgaagacaaacgttgccgacctattctcttccacactgatggtccaaatgctggtgatcaggaaccatttccaatgggaagcaacatacggtcaagaccaggcaagccacgaagcagtagcattgacaactacaacagctttagcatctcttccgtttctgaaaaccgagaagaaactcctaatggaactgatccgttcttgaaggagaactaaccaatgagcaaaacaagcagaggtaaaacaaagaacacataaaaagagacacgaagataacaagaaggttaaatatatataaagttattattatatgatatcatccacacaccctagagttctgtaaatcggggggtgttagatttaccctgacaaaactcattttgcagtgaagaaattttttggagagatgaaaaactttgttgaccacaaaccttttacccaggttgttgttgcttcaccagttttgttgtattatcaaaatcccctgaaaaatattgcaggttttttttttgttcctctttttttttgggttttggggttatattcaaggatttttggttcttgctatcaatgtataacagccttggattacactcatcttctttgctggctatttgtggccattctacgttgtactcttttggacccttttttgaatgcttctattttgggatatataaaaatattatttttcct

SEQ ID NO: 293 - protein, 915 aa, Arabidopsis thaliana
MPSDIMEQRGVSTPSHFHEDIHITSERQFGFMKTDMMPENQGGRDRLSSMPKSSWTSESYQLKPQSSFSGSHPSGSPNARNTTNGSQWESSLFSSSMSDLFSRKLRLQGSDMLSTMSANTVVTHREEEPSESLEEIEAQTIGNLLPDEDDLFAEVTGEVGRKSRANTGDELDEFDLFSSVGGMELDGDIFSSVSHRNGERGGNNSVGELNRGEIPSRTLLVGNISSNVEDYELKVLFEQFGDIQALHTACKNRGFIMVSYCDIRAAQNAARALQNKLLRGTKLDIRYSISKENPSQKDTSKGALLVNNLDSSISNQELNRLVKSYGEVKEIRRTMHDNSQIYIEFFDVRAAAAALGGLNGLEVAGKKLQLVPTYPEGTRYTSQCAANDTEGCLPKTSYSNTSSGHIGRHFPGMISSTSSDGGSMRVIHNSIGSPVNSFIERHRSLSIPIGFPPSANGISASKPVGLQEHGHHFDNSNMGIQSMPNLHPHSFSEYVDNFANGSPYTSSAFSEMVSDGSKANEGFMIHNVRGVEGFSGGGIGSPMHQSSRRPINLWSNSNTQQQNPSSGMMWPNSPSHINSIPTQRPPVTVFSRAPPIMVNMASSPVHHHIGSAPVLNSPFWDRRQAYVAESLESSGFHIGSHGSMGIPGSSPSHPMDIGSHKTFSVGGNRMDVNSQNAVLRSPQQLSHLFPGRSPMGSMPGSFDSPNERYRNLSHRRSESSSSNADKKLYELDVDRILRGEDRRTTLMIKNIPNKYTSKMLLSAIDEHCKGTYDFLYLPIDFKNKCNVGYAFINLIEPEKIVPFFKAFNGKKWEKFNSEKVATLTYARIQGKTALIAHFQNSSLMNEDKRCRPILFHTDGPNAGDQEPFPMGSNIRSRPGKPRSSSIDNYNSFSISSVSENREETPNGTDPFLKEN

SEQ ID NO: 294 - DNA, 2592 bp, Glycine max
atgccttctgaaataatggagaagaggggtgtttctgcctcatctcgctttttggatgacatttcctatgtttctgagatgctgaaggattctaccacagaatcattgaattatcacaagagatcatggtctaatgtgcatcggcagccagcatctagctcatatggtttagttgggagcaagattgtcaccaatgctgcctcacgggaaagcagtctattttcaagctcattgtctgacatgtttagccaaaatgaggaagaaccatataaatctctcgaagaaattgaggctgaaactattggaaatctccttcctgatgaagatgacctgttttctggagtcaatgatgagttaggatgcagtactcgcactagaatgaatgatgattttgaagattttgacttgttcagcagcagtggaggcatggaattggaaggagatgaacatctaatttctggaaaaagaaccagttgcggggatgaagatcctgattactttggagtttctaaaggaaaaattccttttggtgaacaatcttctagaacactttttgttagaaacatcaatagcaatgtagaagattctgagctaaaggctctctttgagcaatatggagatatccgaaccatatatactgcctgcaagcatcgtggatttgttatgatttcttattatgatataagggcagcacaaaatgcaatgaaagcacttcaaaataggtcattgagatctaggaaacttgatatacattattcaattccaaagggcaattctccagagaaggatattggccatggtacactgatgatatccaatcttgattcatctgttttggatgatgaactaaaacagatttttgggttttatggagaaattagagaaatctatgaatatccacaattgaatcatgtcaaatttattgaattttatgatgtccgggctgcagaagcttctcttcgtgcattaaacgggatctgctttgctgggaagcacattaagcttgagcctgtcttttattttggatcttcatatttatgctcaccacctttaatattgttatcaaccaccttgatggaaaaattacatcttgacaattatgcaaaccttgcttttgtaggatttcattctgcgacacagctacctgcttttattgataactcaccgtttcatgtgaattctagcattcacaagatcacaagaggggcatctgcgggaaaagtatctggtgtttttgaggccagtaatgcttttgatgctatgaaatttgcatccatttcgaggttccatcctcattctttacctgaatatcgtgaaagtttagctactggcagtccttacaacttttcaagtaccattaacacggcttccaatattggaactggatcgacggaatcatctgaaagcaggcacattcagggaatgagttcaactgggaacctagctgagtttaatgcaggaggaaacggaaaccacccccatcatggactttatcatatgtggaatgggtccaacttgcatcagcaaccttcttcaaatgccatgctttggcaaaaaacaccatcctttgttaatggtgcatgttctccaggtcttccacagatacccagctttcctagaacaccacctcatgttcttagagcatcacatatagaccaccaagtgggatcagcaccagttgttacagcctcaccctgggatagacaacattctttcttgggagagtcacctgatgcttctggttttagattgggttctgttggaagtccaggctttaatggtagctggcagttgcatcctcctgcttctcacaatatgtttcctcatgttggtgggaatggtacagaattgacgtcaaatgctgggcagggctctcctaagcagttgtcacatgttttccctgggaaacttcccatgactttggtttctaaatttgatactaccaatgaacgaatgagaaacctctattctcgtagaagtgaaccaaacactaacaacaatgctgataaaaaacaatatgaacttgacctaggccgcattttacgtggggatgacaaccggacaacactcatgataaaaaatattcccaataagtatacttcaaagatgcttcttgttgccatagatgagcaatgtcgaggaacttatgattttctgtatttgccaattgatttcaagaacaaatgtaatgttggctatgcattcatcaatatgatcgatcctggacaaattattccattccacaaggcttttcatgggaaaaaatgggagaagttcaacagtgaaaaggtagcagtactcgcctatgcccgaattcaaggaaaatctgctcttattgctcatttccagaattcaagcctgatgaatgaagataaacggtgccgtcctattctcttccatacagatggcccaaatgctggtgatccggagcctttccccttgggtaacaatattagagtgaggcctggaaaaattcgcattaatggtaatgaggagaatcgcagccaagggaatccttcatctttggcaagtggagaagagtccgggaatgcaatagaatctacatcgagctcttcaaaaaattctgactga

SEQ ID NO: 295 - protein, 863 aa, Glycine max
MPSEIMEKRGVSASSRFLDDISYVSEMLKDSTTESLNYHKRSWSNVHRQPASSSYGLVGSKIVTNAASRESSLFSSSLSDMFSQNEEEPYKSLEEIEAETIGNLLPDEDDLFSGVNDELGCSTRTRMNDDFEDFDLFSSSGGMELEGDEHLISGKRTSCGDEDPDYFGVSKGKIPFGEQSSRTLFVRNINSNVEDSELKALFEQYGDIRTIYTACKHRGFVMISYYDIRAAQNAMKALQNRSLRSRKLDIHYSIPKGNSPEKDIGHGTLMISNLDSSVLDDELKQIFGFYGEIREIYEYPQLNHVKFIEFYDVRAAEASLRALNGICFAGKHIKLEPVFYFGSSYLCSPPLILLSTTLMEKLHLDNYANLAFVGFHSATQLPAFIDNSPFHVNSSIHKITRGASAGKVSGVFEASNAFDAMKFASISRFHPHSLPEYRESLATGSPYNFSSTINTASNIGTGSTESSESRHIQGMSSTGNLAEFNAGGNGNHPHHGLYHMWNGSNLHQQPSSNAMLWQKTPSFVNGACSPGLPQIPSFPRTPPHVLRASHIDHQVGSAPVVTASPWDRQHSFLGESPDASGFRLGSVGSPGFNGSWQLHPPASHNMFPHVGGNGTELTSNAGQGSPKQLSHVFPGKLPMTLVSKFDTTNERMRNLYSRRSEPNTNNNADKKQYELDLGRILRGDDNRTTLMIKNIPNKYTSKMLLVAIDEQCRGTYDFLYLPIDFKNKCNVGYAFINMIDPGQIIPFHKAFHGKKWEKFNSEKVAVLAYARIQGKSALIAHFQNSSLMNEDKRCRPILFHTDGPNAGDPEPFPLGNNIRVRPGKIRINGNEENRSQGNPSSLASGEESGNAIESTSSSSKNSD

SEQ ID NO: 296 - DNA, 2592 bp, Glycine max
atgccttttcaaatcatggatcagaggggggtttctgcttcatcccacttttttgatgacatttcctttcgctctgagaaaccaaaatctattaatgaccattacccacaaggtaaggacagatcactccattatttgttcaaaattgttctgtatgctgtaccggtttactatagtttattctcaagctccatgtctgagatatttagccaaaagttaaggttattcgggaatgatgttcggtctgatcatctcattaatgctgattcccctcctgaggaagaaccatataaatctcttgaagaaatggaggctgacactatagggaatctccttcctgatgaagatgatctgttttctggtgttgttgatgagttaggatgcagttctcatgccagaacaaatgatgattttgaagattttgatctgtttagcagtgggggaggcatggagatggaaggagatgaacatttaagttcaggaaaaagaataagtgctctcgatggagattttggtttctttggaggttataaaggaaaacttccttttgttgaacagccttctagaacactttttgttagaaacattaatagcaatgtagacgactctgagctaaaggctctctttgagcaatatggagatatccgaaccatttatacagccagtaagcatcgtgggtttgtcatgatttcttatcaagatctaagggcagcacaaaatgcaatgcaagaacttcaaaataggccattgaggtctaggaaacttgatatacattattcaattccaaaggtcaatgctccagaaaaggatattggccatggtacactgatgctatctggtcttgattcacctgttttagatgacgagcttaaacaaatttttggattttatggagaaattaaagaaatctatgaatatccagaaatgaataatcacaaatttatagagttttatgatgtccgagctgcggaggctgctcttcgtgcattgaacaagattgacatttctgggaagcagatcaagcttgaacctggccatcctaggtttgaaacatggtggcttgacccattttccccctctttttctcttacaacttatcatcaagacaaaaagacattatttacagcaacagtgccttctggagtaattggatctggttgctttgaaaatggatataatcagagatttcaatctacagttaggcaaccgctgaatgcatttatggataatgcattcattcatgtgaattctggtattcacaacactgtgagaggggcacctgctggaaaagtatttcatcctcattccttacctgagtatcgtgatagtttagctaatggtagtccatataacttttctagctccattagcaacatggctaacaatataggtgctggagcaacagaagcctctgatggcaggcatattcagggaatgggctcaactgggaacttggcagaatttaatgcaggagaattccaaattaaatatgggtcttcagttcaagtggttggaactggctccaatttgcaacagcaaacttcatcaagtaccatgctttggcagaaatcaccatcatttgttaatgatgcttcttctccgggccttccacagatgtcaagctttgctagaacaccgcctcatatgctgagaacaccacatatgatggaccatcatgttggatcagcaccagttgttacagcctcaccatgggaaaggaaaaattcttacttgggagggtcccctgaggcttctggttttcgcttgggttctctaggaagtggaggttttcatggttcctggcaaatgcatccactggattttccttctcataacatgttttctcatgttggtgggaatggcaccgaactaacatccaatgctggacagaactctcctaagcagttatctcatgttttccctgtgagacatcctatgtcttcaatgtcaaaatttgatgcttccaatgaacgtatgagaaacctttatcaccgtagaaatgaagcaaacaccaacaatgttgataaaaaactgtatgagcttgatttaggtcgcatattgcgtggggaagacagccgaactacacttatgataaaaaatattcccaacaagtatacttcaaagatgcttcttgctgcaatagacgagcaatgtaagggaacttatgattttctgtatttaccgattgatttcaagaataaatgtaatgttggctatgcattcataaacatgattgatcctggtcaaattattcctttccaccaggcttttgatgggaaaaaatgggagaagtttaatagtgaaaaagtagcctcacttgcctatgcccgaattcaaggaaaagcttctcttattgctcattttcagaactcaagcctgatgaacgaagacaaacgttgccgtcctattctcttccatacagatggcccaaatgctggtgatccggagccttttcccatgggtgccaatattagactgagacctggaaaatctcgcactgctggcaatgaggagaatcgaagccaagggagcccttcaactttgtcaagtggagaagacgctaatgggatagactcttcaaaaaacacttaa

SEQ ID NO: 297 - protein, 863 aa, Glycine max
MPFQIMDQRGVSASSHFFDDISFRSEKPKSINDHYPQGKDRSLHYLFKIVLYAVPVYYSLFSSSMSEIFSQKLRLFGNDVRSDHLINADSPPEEEPYKSLEEMEADTIGNLLPDEDDLFSGVVDELGCSSHARTNDDFEDFDLFSSGGGMEMEGDEHLSSGKRISALDGDFGFFGGYKGKLPFVEQPSRTLFVRNINSNVDDSELKALFEQYGDIRTIYTASKHRGFVMISYQDLRAAQNAMQELQNRPLRSRKLDIHYSIPKVNAPEKDIGHGTLMLSGLDSPVLDDELKQIFGFYGEIKEIYEYPEMNNHKFIEFYDVRAAEAALRALNKIDISGKQIKLEPGHPRFETWWLDPFSPSFSLTTYHQDKKTLFTATVPSGVIGSGCFENGYNQRFQSTVRQPLNAFMDNAFIHVNSGIHNTVRGAPAGKVFHPHSLPEYRDSLANGSPYNFSSSISNMANNIGAGATEASDGRHIQGMGSTGNLAEFNAGEFQIKYGSSVQVVGTGSNLQQQTSSSTMLWQKSPSFVNDASSPGLPQMSSFARTPPHMLRTPHMMDHHVGSAPVVTASPWERKNSYLGGSPEASGFRLGSLGSGGFHGSWQMHPLDFPSHNMFSHVGGNGTELTSNAGQNSPKQLSHVFPVRHPMSSMSKFDASNERMRNLYHRRNEANTNNVDKKLYELDLGRILRGEDSRTTLMIKNIPNKYTSKMLLAAIDEQCKGTYDFLYLPIDFKNKCNVGYAFINMIDPGQIIPFHQAFDGKKWEKFNSEKVASLAYARIQGKASLIAHFQNSSLMNEDKRCRPILFHTDGPNAGDPEPFPMGANIRLRPGKSRTAGNEENRSQGSPSTLSSGEDANGIDSSKNT

SEQ ID NO: 298 - DNA, 3626 bp, Hordeum vulgare
aacacagtgtagagagggagagaaagcgtccttcttcctcctccccgactccggccggcgaggtcgggacggagctccgccgctccaccgagccgcggatcggtggcgtaggcagttgaggggctgaggaggtgaaagaaagaggcaacgaaagcacccatggtgatagcttccggagtgattgacaggggacacctgtcctcgttcggcggcccaccgccagactcgtcgtcgtcgttcttctccgaagaccttgtccccacagagaggcaggttgggttctggaaatcggagtcaatggtggatcagagagggagcaagccagtttttgcttctccacttgagaagatccatccgacgggagcaaatcctgaaggcagtctggaacaaacagggggccaagtcttcaagggcctagatgcccttcgcgtcagtaaggcgatggggcaaggaaatgcgtcaagttcgccatcaacatcctggggtgatatgctcacgacccctggatctagatttggcttgtctgataaaaagacggctattgccgaaacaactggtggcaacccgaggataatggccactggtgtttgtggccagtctgctagcttcatctgtgagggagatgaacctctagggtccatggaggaaattgaagctcaaaccattggagatcttctaccaaccgatgatgatttgatatcaggcgtcatcgatggctttgaactctctggcctgtctatcaaccaggatgatgccgatgaagatatattttgcactggaggagggttggagcttgagaatgacgattccatctccattaaaggtgcaagaaatgtggaaggatcctcaaagtgccattttcctggggagcaccacatcagcagatgtccttccagatcactttttgtcacaaacatcaacaccaacattgttgattctgatctgagagttctgtttcagcaatatggggacgtacataagcttttcacctgcaaggaacatgggtatgtaagagtgtcgtactatgacatacgagttgcccaaaacgcaatgagagcactccatggcaagcctctggggcccgtgaagcttgatgtacaattttgcattcctaagggaaatgcttcagataagggtatgaacgaggggattttggcggtgtctaacatcgacccatctgtttccaatgatgatcttctccaagcacttactgtttatggtgatgtgaaggagatttccagggcttctacaagctgcaataagaaactcgtagagttctacgatgtcagagcggcagaagcagcactatatgaccttaataagggtgctatctcaggcccaaaaatcaaggctgaagttagcaatcccggaggggcaaattttggcttgagacaacagtatccgagagagtggaagcttgatggttcccctcaccagcctagaaactctccgcctgggatcattggaggccctagaagtcatgagaacagcagtctgcataatttattttctccagttagtccgcagttggatagatcaccccatggcatcgcttcaagtggccctcagaagctgtcgtcgcctatcagaattgaacctgcacgtcagtacaataatcaagctgctattagtgaacttggcggatcgcttggtcaaggaaactttggacatggaatgcagatgttccagccacactcactgccggagtgtcagaacggtatgtgtaatatctccaagtccatgacatcaagtggcaggagtgctggcttcagagtagatggagtggattacagtcatctccagaaagtgggctctggtagccttcatggtcattccttcgatcaaaataatgaagcatttgggcctaccggcgttggaagttttcccctcaatggacaccactacagttggaatagctcaaatgctttccctcaaagtccctcctctccaatgctgtggtcgaacatgcagcacccagggcacatgcatggttatcctggtgtcgtgccacctcacacactgaataacggtgcttatcctatggatcaacaccacatgggttcagctccaaacaatggaggcggtttcagaaatgcgcgctctgttcacccagggtctcttgggagtgtagggtttcctggtagccctcagatgtatccatcagatgtccctgtcttcacacctgccaggggaagttacagggacaccatgttctccccagttggtgccggattcccatcgctgcaacagatgtgcaatgtaatgaaccgaaggaaccctatggtccaggtttccgcttcctatgatgctacgaatgatcggatgaggagaagcagacatgatggaaacgctgctgtccagccagaaaataagaggctgtttgagcttgacatcgagcggatagcgcagcatgaagacccacgcaccacattaatgattaaaaacattcctaacaagtacaactgtaaactgcttctgggcgtcattgatgagaatcatcgtggaacttatgatttcgtctaccttccgatcgacttcaagaacaaatgcaacgtgggctatgctttcatcaacatgaccgatccacagcacataattccgttttacaagacatttaatggcaagagatgggaaaaattcaacagcgagaaggtggcaacactcgcatatgctagaatccagggcagaaagcaattagttgcccattttcagaattctagcctgatgaatgaagacaaagggtgtcgccctatactcttcggcgaggatggggtgcaggaacctttccctgttgggaacaacatccggcctaggtccgggaggaacaggccgctccacagctcggacaccagaggagacgcgagcctgtcgacctcgcctaacctggagaactctagccgcagggctaacgcggtctagggcgatgactcgatcttggctcactaactggaggacgaagaagctgcaataaattacccccagttttgctatttatttttctctccggcaaggctggggcatgtagcgagttcggacggtctgctggcgattcgccgtgagtaagttgcgcaagggcgccctcgtttttgccccgccgacgaactctagagttcggacggttgcaaggtgggcgaaatgcgcaggaggtgatgtgtgttttgtgtgtgtgtgtgtgtcaagaagagggatggggagctgtacagttgagttggaggggtgttggatgctaatctgacttgaatgcttttaatttaaactcggttcattttgcttgagtttcccaaaactgtgtcgcccgattattttgcccctttttcccggccccctggattgttccctgttaactgatcgactcgcccttcggttggggggggccgcggccccgcgagggctttggggaaggggtggagagggccgcgaggggggggagagggggggcggggggcccagggaagaaatggcgcagccagattgccctatttatatgtaacccgacagacccttacgtcatgactggtggatttttcttttttctgaacttgctagcaccgttttccccccggcggaacttctcaatatccctgacatccacgctatcgcgtgttcattactttctttatactctt

SEQ ID NO: 299 - protein, 919 aa, Hordeum vulgare
MVIASGVIDRGHLSSFGGPPPDSSSSFFSEDLVPTERQVGFWKSESMVDQRGSKPVFASPLEKIHPTGANPEGSLEQTGGQVFKGLDALRVSKAMGQGNASSSPSTSWGDMLTTPGSRFGLSDKKTAIAETTGGNPRIMATGVCGQSASFICEGDEPLGSMEEIEAQTIGDLLPTDDDLISGVIDGFELSGLSINQDDADEDIFCTGGGLELENDDSISIKGARNVEGSSKCHFPGEHHISRCPSRSLFVTNINTNIVDSDLRVLFQQYGDVHKLFTCKEHGYVRVSYYDIRVAQNAMRALHGKPLGPVKLDVQFCIPKGNASDKGMNEGILAVSNIDPSVSNDDLLQALTVYGDVKEISRASTSCNKKLVEFYDVRAAEAALYDLNKGAISGPKIKAEVSNPGGANFGLRQQYPREWKLDGSPHQPRNSPPGIIGGPRSHENSSLHNLFSPVSPQLDRSPHGIASSGPQKLSSPIRIEPARQYNNQAAISELGGSLGQGNFGHGMQMFQPHSLPECQNGMCNISKSMTSSGRSAGFRVDGVDYSHLQKVGSGSLHGHSFDQNNEAFGPTGVGSFPLNGHHYSWNSSNAFPQSPSSPMLWSNMQHPGHMHGYPGVVPPHTLNNGAYPMDQHHMGSAPNNGGGFRNARSVHPGSLGSVGFPGSPQMYPSDVPVFTPARGSYRDTMFSPVGAGFPSLQQMCNVMNRRNPMVQVSASYDATNDRMRRSRHDGNAAVQPENKRLFELDIERIAQHEDPRTTLMIKNIPNKYNCKLLLGVIDENHRGTYDFVYLPIDFKNKCNVGYAFINMTDPQHIIPFYKTFNGKRWEKFNSEKVATLAYARIQGRKQLVAHFQNSSLMNEDKGCRPILFGEDGVQEPFPVGNNIRPRSGRNRPLHSSDTRGDASLSTSPNLENSSRRANAV

SEQ ID NO: 300 - DNA, 2430 bp, Medicago truncatula
atgccttgtgaaacaatggatttcaaaagtttttcttcttcatcattgttttcctctgaagattcttgttcttctactgagagtcaagctggatggtggaaatcagataaaccttccaaaggcaatgattctgatcaaggaataaaaccctttgaagatagtaaagaagatgatatagttgcctctcggcacgaaagcagccttttctcaagttctctgtcagatttgttcagcaagaaattgcgattatctgcgaataatgctttctatggacattcagtggatacaattgcatcaaattatgaggaagagaagctttctgactctcttgaagaactcgaggctcaaattattggaaatctactcccggacgaggatgatttactttctggagtgaccgatgggaacaattacatcatttgtgatagcaatggcgatgacatagatgaactagaccttttcagtagcaatggaggttttgatcttggagacgttgaaaatccatcctctattgaaaggaattctgaaatcatcagtggagttcgtaatagctcaatcgccggagaaaactcttatggcgaacacccttctagaacattatttgtgagaaatattgatagtgatgttaaagattctgtgttgaaagctctttttgagcaatttggtgatattcacacttttgatagaacttgcaagcatcaagggagtgctatgatatcatattatgatattagagctgcccaaaatgcaatgagagcactcaataatagactcttcggccgcaagaagttcgacattcattatcctattccaaaggatagtccttccagaaatggtgttaatcagggaacgcttgaagtatttttatatgattcatcaatttcaaatactgaacttcaacatatattgaatgtttatggaggaatcaaagagattcatgaaaaccctcgcagtcagcgtcacaagttgatcgagttttacgattttagagctgcagatgcagctctccatggtataaacagaaatgatactaccatgaagaggttaaaggttgatcaaatgcaatctacaaactcagaaagcaatatcattcaaccgatgcatcccgaattcaagcaagaatgcgacctctgtcttcatcagaagagtcctcttcttaagccaacaactagcttccaagacttgcatggtacctcttcaagtgttccgaatatgttaccgtctataatgaaagttaaatcagttgcaaaccaatgtgaatttgctgaatctagttcacgaggccagttgaactttgatactcaagctgcattaacttctcatcctcattccctccccgaacagcgtcgtggttttactagcggtgttcaccaaaaccctcatgaagaggctgcaaacatcaatctccaaacaccggaaagaatagataacatgcagttttgtcaagttaactccaatggacccttcatagattttgataaatgtgtttcaaattcctctgctaatataagctcaagtttcccacttcctgtccatcatgaacaatggagcaactcctatccgcctcctcgaacaatatggccgaattcaccgtcatatttcgatgggatttatgcagcatctaccctgcaaagattgaaccaacttcctatgtcaccatcacatatgataaccactgttttaccaacaaataaccatcatattcaatcacctccattttgggacagaagatatacctatgcagctgaacctataacaccacattgtgttgactttgttcctcataacatgttccctcatttcggactcaacgtccataaccaaagaggcatggtgtttcctggtagaaaccatatgattaattcatttgatacatacaaacgcgttcgaagccgtagaaatgttggcgcatcaaacttggctgacatgaaacgatatgaacttgatattgactgcattaaaaggggcgaagataaccgaacaacacttatgattaagaacattcctaacaagtatacttccaagatgctgttggctgcaatcgatgaacaccataaaggagcttatgattttgtgtatctaccaattgatttcagaaacaaatgcaatgttggatatgcattcatcaacatgactagtcccagcttgattgtaccattctatcagggtttcaacgggaagaaatgggagaaattcaatagtgagaaagtggcatcactcgcatatgctcgcatacaaggaaaagcagccctcgttgctcacttccagaattcaagcttaatgaatgaggataagcgctgcaggcctatcctcatcgacactgatggtccaaatgctggtgatcaggtccctttcccaattgccatgaaacctggaagaatgagaagcagcattcatgaggaagacagtatttcaaaggaatcagactaa

SEQ ID NO: 301 - protein, 809 aa, Medicago truncatula
MPCETMDFKSFSSSSLFSSEDSCSSTESQAGWWKSDKPSKGNDSDQGIKPFEDSKEDDIVASRHESSLFSSSLSDLFSKKLRLSANNAFYGHSVDTIASNYEEEKLSDSLEELEAQIIGNLLPDEDDLLSGVTDGNNYIICDSNGDDIDELDLFSSNGGFDLGDVENPSSIERNSEIISGVRNSSIAGENSYGEHPSRTLFVRNIDSDVKDSVLKALFEQFGDIHTFDRTCKHQGSAMISYYDIRAAQNAMRALNNRLFGRKKFDIHYPIPKDSPSRNGVNQGTLEVFLYDSSISNTELQHILNVYGGIKEIHENPRSQRHKLIEFYDFRAADAALHGINRNDTTMKRLKVDQMQSTNSESNIIQPMHPEFKQECDLCLHQKSPLLKPTTSFQDLHGTSSSVPNMLPSIMKVKSVANQCEFAESSSRGQLNFDTQAALTSHPHSLPEQRRGFTSGVHQNPHEEAANINLQTPERIDNMQFCQVNSNGPFIDFDKCVSNSSANISSSFPLPVHHEQWSNSYPPPRTIWPNSPSYFDGIYAASTLQRLNQLPMSPSHMITTVLPTNNHHIQSPPFWDRRYTYAAEPITPHCVDFVPHNMFPHFGLNVHNQRGMVFPGRNHMINSFDTYKRVRSRRNVGASNLADMKRYELDIDCIKRGEDNRTTLMIKNIPNKYTSKMLLAAIDEHHKGAYDFVYLPIDFRNKCNVGYAFINMTSPSLIVPFYQGFNGKKWEKFNSEKVASLAYARIQGKAALVAHFQNSSLMNEDKRCRPILIDTDGPNAGDQVPFPIAMKPGRMRSSIHEEDSISKESD

SEQ ID NO: 302 - DNA, 3394 bp, Populus trichocarpa
atgccatctgaaataatggacttacagggtttgtcctcatcatcatttttctctgaagatgcttcctttcccagtgagaggcaggtggggttttggaagtcagacacaatgcctgatcaacgcggtcagtatattcgagatacgcttgggaaatcatatgtcttgtcacccagtgagaaacttgtagctgtggagtcagttcaatcgcttgaacatcctcagccttccctaatgcatgaccagaaaatgaatcatagcttagataagcatgcagtgggagcagagagagcattaaaccggtccttcactttgttgagacccgtggacaacgatactggtacagggaccagtttgaatgtacagccaacatcttattttgcagaagttggcaaagtgaatgcgatggcaactcagcacgagaatagtctcttctcaagctcgttatcagaattatttagtaggaagttgagattatcttcaaccaattctctatatggccattccgttgataccattgcctctcactttgaggaagaggaaccttttcagtctcttgaagaaattgaggcccaaaccattggaaaccttcttcccaatgacgatgacttgtttagtggggtgactgatagagtagaaaatatcaaccatcccagtggtggagatgatatggaggatttggactttttcagcagtgttggagggatggatttgggggatgatggttctgtggcccagattgactctgaatttcatggaggagcttctaatggtcagctgggggcatgcaatctttcagtggcaggagaacacccttacggtgaacacccttctagaacgctctttgtgagaaatataaatagcaatgtcgaagagtctgagttaagggctatatttgagcaatatggtgatattcgtacactttatacggcttgcaagcatcgaggttttgttatgatatcctactacgatattagagcagccaaaaacgcgatgaaagcactacagaataggcctttgagatgtaggaaacttgacattcattactcaattccaaaggacaacccttcagagaaagattttaaccagggcactcttgctgtgttcaaccttgattcttctgtttcaaacgacgatcttcgtcggatatttggcgtctatggagagatcaaggagattcgtgaaaccccacacagaaatcatcacaaatttgttgaattttatgatgtgagagctgcagaggctgctcttcatgcattgaacaagagtgatattgctgggaagcggattaagcttgaagcaagctgtccagggggtttgagacgtttattgcaccagattcctcctgagttggaacaagatgaatttgggcctttcgtgcagcagagcagccctcccaataactcaactactgaattctctggaacagttatatccactggcatggataatgggcctattttgggagcacactctgcaacacaagccccgttttttgaatctgcattgcatcatggaatctcttctagcgttcctaacagcatgtcctcactttcaagagttgaatcagctggcaatcaaactggctttgctgagctcagtcactcaccaggtcatttgaaatttgatatccagagcactttaaattttcatcctcattcacttcccgagtatgatggtctaaatagtggtgttcactgcaactctcctggagcaatggctgcaaacatcaatccaaggctacttgaaagaattgatacccggcatttagccagaattagcccaaatggaaacccaattgaattcagtgaaggagtttttggatctgcccgaaatggaagctgctctcgacctggacatcactatacatggggtaactcctatcatcaccagcccccaggcatgatttggccaaactccccatcatttgtcaatggaatttctgtagctcatcctggaccacggctgcatggacctcctagagcaccacctcctatgctgaatcctgttttacccatcaataaccaacatgtgggatctgtgccagctgtcaatccttctctctgggatagacaacacgcatatgcaggggaatctcctgatgcttctggtttccatccctgttctcttgggagcatgaggatttccaataattcgttgcactccatggaatttctctcccctaagatgtttcctcatgtggggggaaactgcctggaacttccaatgccccctcaaaatgttgggttccaatcacaacagcagaggtccatggtgtttcctggcagaggccaaatgattcccatgattaatacatttgatgctcctggtgaacgtgctagaagccgtagaaatgaaggcagcactagtcaggcagacaagaaacaatacgagcttgacattgatcgcatattgcaaggggaagacaaccgaacaacacttatgataaagaatattcctaacaagtatacttcaaaaatgcttctggctgcaatcgatgaacgccataaaggaacttacaattttaacaaatgcaatgttgggtatgcgtttatcaacatgattgatcccagacaaataattccattctatcaggcatttaatggaaagaaatgggagaaattcaatagtgaaaaagtagcatcgcttgcatatgcccgcatacaaggaaaagcagctctcattgcacatttccagaattcaagcttgatgaacgaggataagcgatgcagacccattctcttcaataccgacggacccaatgcaggtgaccaggtgccctttccaatgggggttaatgtaagaactagacctgggaaaccccgaaccatcacccatgaggagaaccagcaaggaagcccatcaaatctggcaggtggggaggattcttcaaatggggacgcttcctcaggttctggaaaggagtctgattaagcaagccacttgtttttgtgggctctaaccttgtaggactgagtaatttaagatcggcgccaccccaagtctttacggcgctgtggtggctgattaaaaagagacttttttcatcttttgagaagcttcttaaaaattatagaggacctagccagacctaaagtgaatttccaattttattcagattttcatagaattctgaaatggttagacaaagaagcatcaggtggggcttcgaaattttggatgttgttgagagtaatctacacacacacacacaacatagtatgtataggagtttctgagaaaataagggatctttttgccgaggttccggaggcttctgtatttcccggggttttgtttgcttttgaatgtttgcttgtatcccatttgtaatttctcgctgaaatataccgaagtcagggacctttgtttttaaattttttgaagcggtgaaccc

SEQ ID NO: 303 - protein, 976 aa, Populus trichocarpa
MPSEIMDLQGLSSSSFFSEDASFPSERQVGFWKSDTMPDQRGQYIRDTLGKSYVLSPSEKLVAVESVQSLEHPQPSLMHDQKMNHSLDKHAVGAERALNRSFTLLRPVDNDTGTGTSLNVQPTSYFAEVGKVNAMATQHENSLFSSSLSELFSRKLRLSSTNSLYGHSVDTIASHFEEEEPFQSLEEIEAQTIGNLLPNDDDLFSGVTDRVENINHPSGGDDMEDLDFFSSVGGMDLGDDGSVAQIDSEFHGGASNGQLGACNLSVAGEHPYGEHPSRTLFVRNINSNVEESELRAIFEQYGDIRTLYTACKHRGFVMISYYDIRAAKNAMKALQNRPLRCRKLDIHYSIPKDNPSEKDFNQGTLAVFNLDSSVSNDDLRRIFGVYGEIKEIRETPHRNHHKFVEFYDVRAAEAALHALNKSDIAGKRIKLEASCPGGLRRLLHQIPPELEQDEFGPFVQQSSPPNNSTTEFSGTVISTGMDNGPILGAHSATQAPFFESALHHGISSSVPNSMSSLSRVESAGNQTGFAELSHSPGHLKFDIQSTLNFHPHSLPEYDGLNSGVHCNSPGAMAANINPRLLERIDTRHLARISPNGNPIEFSEGVFGSARNGSCSRPGHHYTWGNSYHHQPPGMIWPNSPSFVNGISVAHPGPRLHGPPRAPPPMLNPVLPINNQHVGSVPAVNPSLWDRQHAYAGESPDASGFHPCSLGSMRISNNSLHSMEFLSPKMFPHVGGNCLELPMPPQNVGFQSQQQRSMVFPGRGQMIPMINTFDAPGERARSRRNEGSTSQADKKQYELDIDRILQGEDNRTTLMIKNIPNKYTSKMLLAAIDERHKGTYNFNKCNVGYAFINMIDPRQIIPFYQAFNGKKWEKFNSEKVASLAYARIQGKAALIAHFQNSSLMNEDKRCRPILFNTDGPNAGDQVPFPMGVNVRTRPGKPRTITHEENQQGSPSNLAGGEDSSNGDASSGSGKESD

SEQ ID NO: 304 - DNA, 3050 bp, Populus trichocarpa
tctgggtgtctctaaagctgctgctgcaccatgccgtttgaagttatggatcataggggtagtactgctgcatcctcccactatttcgatgacatccattttcctgctgagagacaaattgggttttggaagcctaatgtaatgcctgatcaccaagttggaatggatggaaagatacctattcccagcggcaactgtgtagcttcttttcctttggaaaaaatttcaccaggtggaccaattctaatgcatcatgcggagttatcacggtcaattctagccagagatcaaaaagagaagtcactcattagtgaaggaagtgctaatacatccaagcatgcatggagttccatggatcatcatccaaaatcctggtcaagtttgtcaatgcaacctgcatcctatagtacagggagaagtagggttgatatcagtgggacccagtgggaaagcagtctcttctcgagctcattttctgaaatattcagtagaaagttgaggtcatcaagaaatgacattcaatctcatcaacctgctaagaccatcacttcttcccatgaggaagaagagccttttgaatcacttgaagaacttgaggcgaaaactataggaaatctcctccccactgaagataacctgttttctggagtgactactgaatttgggcgtgatgctcagatcaataacttggatgatctggaagattttgacctgttcggcagtggtggaggcatggaattagaaggggatgtggcccgaggaaattccggtctcctcaggggagtttccaatggtcaaggggactctaatggttcaattgttgttgggcatccttctagaacactttttgtcagaaacatcaatagcaacgttgaagtttctgaattgaaggctctttttgagcaatatggagatattcgaactctctatacagcctgcaagcaccgtggctttgtgatgatttcttattatgatataagagcagctcgaaatgcaatgagtgcacttcaaaataagccattgaagcataggaatcttgacatacattattcaattccaaaagacaatccatcagagaaagatatgaaccagggcactctagtggtctttaaccttgattcttctgttacaattgacgagcttcgtcaaatatttggtgtttatggggagattaaagagatccgtgaatccccacataagcatcatcacaaattcgtagagtactatgacattagggctgcagaagcagccctttctgcactaaataggagtgacgttgctggcaagcagatcaagattgaatcaagtcacccagggggcactagaagcttgatgcaacagcctgagcatgagcaagctgaacgtaatctcttacagagcccctttaacgacttatcatctggaccattggccacattttctcctggagtatcagcatctagctacatggctaatggatcttctcaggttttacattctgcaatcccatcacagctgggtgcattcgctgaacttcacaggagttctagtgtttcaaacaacttaccatctccagtgacagcaagtgctgctaaacaattctccatagatgaaatgaagtttggcaacaaatgtattccaagtattcatcctcattccttgccagagtaccatgatagttttgccaatactattccatacaactctccaagcactatcagagacatgcccagcagtttcacttccaaagtgacagaaggaattaacagcttacatattcgaggggtagggtcaaacgggcacatgatggagcttaatggaggggtttttggatctcctggaactggaagctgcactcttcctgggcatcattatgtatggaagaattccaagtcaggtcaacaacatccttcaaatgccatgatttggtcaaattcaccatcatttgccaacggtgttcacgctcatcatgttccacacatgcctggattccctagaggacatacagttatgctgaactctgcacctgcaccccatcacattggatctgcaccagctgtcaatccttctctatgggataggcggcagacattttctggggagtctcctgaagcttctagttttcacttgggtgctcttgggagtgtgggttttcctggtagctctccaccacatccaatggaaattgcctcccacaacattttctctcatggtggaagttgtatggacatgactaaaggcactggcctacccgcttctccgcagatgtgccaaatgttccctgggaggaacccaatgatttcaatgccagcctcttttggttctcctaatgagcgcgtgcggaacttctcacatcgtagaattgaatcgaattcgaatcattcagataagaaacaatatgaacttgacattgactgcatactgcgtggcgatgacaaccgaaccacattgatgataaagaacattccaaacaaatatacttcaaagatgcttctggctgcaattgatgagcagtgtcgaggaacctatgattttatttacttgccaattgacttcaaggcaagtgaattttctggtggatcaaccttaaacaaatgcaatgtgggctatgcattcatcaatatgattgatcctcaacagatcattccattccataaggcattcaatggaaaaaagtgggagaagttcaacagcgagaaagtggcatctcttgcatatgctcgtattcagggaaaaactgctcttattgcgcatttccagaattcaagcttgatgaatgaggataaacgctgtcgtcctatactctttcattctgatggtcccaatgctggtgatccggaaccattccccatgggcactcatattcgatcaaggttgggtaaacctcgatccagtggcaatgaggagaaccaccatagtgggagcccttccactttggctaatggagaggactctccaaatggaatacactctccatccggttccgactgagtagttttctttgccatactaactccaaccctgtatgggtgcaaaatgtcgtatctaccccagttctgtatattaggggt

SEQ ID NO: 305 - protein, 979 aa, Populus trichocarpa
MPFEVMDHRGSTAASSHYFDDIHFPAERQIGFWKPNVMPDHQVGMDGKIPIPSGNCVASFPLEKISPGGPILMHHAELSRSILARDQKEKSLISEGSANTSKHAWSSMDHHPKSWSSLSMQPASYSTGRSRVDISGTQWESSLFSSSFSEIFSRKLRSSRNDIQSHQPAKTITSSHEEEEPFESLEELEAKTIGNLLPTEDNLFSGVTTEFGRDAQINNLDDLEDFDLFGSGGGMELEGDVARGNSGLLRGVSNGQGDSNGSIVVGHPSRTLFVRNINSNVEVSELKALFEQYGDIRTLYTACKHRGFVMISYYDIRAARNAMSALQNKPLKHRNLDIHYSIPKDNPSEKDMNQGTLVVFNLDSSVTIDELRQIFGVYGEIKEIRESPHKHHHKFVEYYDIRAAEAALSALNRSDVAGKQIKIESSHPGGTRSLMQQPEHEQAERNLLQSPFNDLSSGPLATFSPGVSASSYMANGSSQVLHSAIPSQLGAFAELHRSSSVSNNLPSPVTASAAKQFSIDEMKFGNKCIPSIHPHSLPEYHDSFANTIPYNSPSTIRDMPSSFTSKVTEGINSLHIRGVGSNGHMMELNGGVFGSPGTGSCTLPGHHYVWKNSKSGQQHPSNAMIWSNSPSFANGVHAHHVPHMPGFPRGHTVMLNSAPAPHHIGSAPAVNPSLWDRRQTFSGESPEASSFHLGALGSVGFPGSSPPHPMEIASHNIFSHGGSCMDMTKGTGLPASPQMCQMFPGRNPMISMPASFGSPNERVRNFSHRRIESNSNHSDKKQYELDIDCILRGDDNRTTLMIKNIPNKYTSKMLLAAIDEQCRGTYDFIYLPIDFKASEFSGGSTLNKCNVGYAFINMIDPQQIIPFHKAFNGKKWEKFNSEKVASLAYARIQGKTALIAHFQNSSLMNEDKRCRPILFHSDGPNAGDPEPFPMGTHIRSRLGKPRSSGNEENHHSGSPSTLANGEDSPNGIHSPSGSD

SEQ ID NO: 306 - DNA, 3643 bp, Sorghum bicolor
atgccatctcaagtcatggatccgaggcgccacctctcccagttcagcaatccaaccctggctgcgtcctccttctctgaggagcagcttcgccttcccactgagaggcaggtcggattttggaagcaggagtcgttgcatcacattggaagcaagtcagttgcatcttctccaattgaaaagccccaacccattgggacaaaaactgtggctcggatagatccacaaccatacaagctgagagaccagaagactgcatttagccttgagcacaagacttttggtcaagagagacatgttaacttgccaccatctctgtggagaactgatcaagaccctaacctccaatctgattcatctttgtttcccgacggaaggaggactaatccaaatgaggcctacaatgagaatgggcttttctcaagctccctgtcagaaatttttgacagaaaattgggactgagatccaaggatgtgcttctacgtcagccagttgaaaaggttgatccaactcatgtagatgaggagccctttgagttaacggaggaaatagaagcgcaaataataggaaacatacttcctgatgatgatgacctattatcaggtgttcttgatgttgggtacacagcccatgctaacaatggtgatgatgtcgatgatgatatattctacactggaggcgggatggaactggaaaccgatgaaaataaaaaaaatacagaaactaatggtggagctaatgatggccttgggttgcttaatggcacaatgaatggtgaacatccatatggggaacacccttcaagaactctcttcgtccgaaacattaatagcaatgttgaggattctgaattaaggctcctatttgagcattatggagaaatcagcaacctttacactgcctgcaaacatcgtggttttgtgatgatatcttactatgacataagatcagcatggaatgccatgagggcacttcaaaacaagccactcagacgtagaaaacttgacatacattactccattccgaaggacaatccttcggagaaggatattaaccaggggatgcttgttgtatttaatgttgacccgtctgtaacaaataatgatatccatcagatatttagcgactatggtgaaataaaagagattcgtgatgcaccgcaaaagggtcatcacaaaattattgaattttacgatgtcagagcagccgaaagtgcagttcgtgctttaaacaggagtgatcttgctggcaagaaaataaaattggagactggccgtctgagtgctgctagacgtttaacacagcacatgtccaaagagttggggcaggaggaatttggtgtatgcaaactgggcagtccaagcacaaatagccctccattggcttcattgggttcatctaatatggcagcaatgacatcttctggtcgtgaaaatgggagtattcatggtttgcattctggacttctcacatcaatgagcccgttcagagaggcttctttcccgggtctatcatctaccataccacagagcctgtcctctcccattggaattgcatctgctgcaactcatagtagtcaggcttcccttggtgagctcagccactcacttagtcggatgaatgggcatatgaattatggttttcaaggcatgggtgcccttcatccccattcccttcctgaagttcacaatggagcaaataatggcaccccttacaatctaaacaccatggcaccaattggtgtcaatagcaactcgagaacagctgaagcagttgacagcagacatcttcataaagtgggttctggtaacctcagtgggcactcatttgatcgtgtcggcgaaggagctatgggattttcaagaagtggaagcggtcctgtccgtggtcaccagctaatgtggaataattcaaataacttccaccgtcatcccaattcccctgtgctgtggcaaaatccgggatcatttgtaaacaatgtaccgtctcgccccccagcacaaatgcatggagttccaagagcaccatcacacatgattgagaatgttcttccaatgcatcatcatcatgtgggctctgcaccagcaatcaatccgtcactttgggacaggcggcatggctatgcaggggaattgacggaagcatcaagttttcatcctggcagtgttgggagcatgggatttcctggtagccctcagcttcatggtttggagctaaatagcatattttctcacaccagtgggaatcgcatggatccaaccgtgtcttccgctcagatcagcgcaccatctcctcaacaaagaggtcctatgttccatggaaggaatcctatggttcctcttccatcatttgattcacctggtgagcggatgagaagccggagaaatgactcaggtgctaaccagtctgataataaacggcagtacgagcttgatgttgaccgcataatgcggggggaagactcacgaactacactgatgataaagaatatcccgaataagtatacctccaagatgctcttggctgctattgatgaaagtcataagggcacttatgattttatttacttgccgattgattttaagaataaatgtaatgttggctatgctttcatcaacatgaccaaccctcagcatatcatcccgttttatcagacttttaatggtaaaaagtgggagaagtttaacagtgagaaggtggcatcacttgcttatgccagaatccaagggaaaacagccctgattgctcatttccagaactctagtttgatgaatgaggacaaacgctgccgccccatactcttccactcagaaggtcctaatgcaggagatcaggaacctttccctatgggtacaaacatccgagccaggtctgggagatcccgaacttcctctggtgaagaaaatcaccatgacatccagacagtcttgaccaacggtgacacttcttccaatggagctgacgcttcaggttccaccaaggacactgagtagctgaactgcagcttgctgcctcgctaaccacaaaggcccaagctataactttttgcaaacccattttcagttctagttttcccccctttcccattttggttttgtttggtaagtctcccgatctgtatttattaacatccatgatgtgggtcactgaagacttaggttgctgcaaaaattttgtctctggcgggaagctatatgcaaagagggtgctacctattccccagaatctatgtgcttgttaacctgaaggccgagaaaggtgaaaggcgcagggagagcctccagattttggtcgctgtaagaattaaccccatgttgtacagcaggtcccagtaacttgtgctgaggggagagtgaaggagtcattttaatcagtttagtggtggtgtgtgtgtgtggagaagaagagtcttgcctgcattttcttttggaaccttctcttgtgccttcacctgtgttgcattttgagtcgagggctcctcttaaattgtgtgcagaggggctcgattttgttaaccggaacatggcgcatttgcgtctggatcaaccccggtcttgtcttcagggcactgtcgccgtatttatcaaccttcttatgtacatctccatcttcttctacatatagtacatgagttttgatgtc

SEQ ID NO: 307 - protein, 997 aa, Sorghum bicolor
MPSQVMDPRRHLSQFSNPTLAASSFSEEQLRLPTERQVGFWKQESLHHIGSKSVASSPIEKPQPIGTKTVARIDPQPYKLRDQKTAFSLEHKTFGQERHVNLPPSLWRTDQDPNLQSDSSLFPDGRRTNPNEAYNENGLFSSSLSEIFDRKLGLRSKDVLLRQPVEKVDPTHVDEEPFELTEEIEAQIIGNILPDDDDLLSGVLDVGYTAHANNGDDVDDDIFYTGGGMELETDENKKNTETNGGANDGLGLLNGTMNGEHPYGEHPSRTLFVRNINSNVEDSELRLLFEHYGEISNLYTACKHRGFVMISYYDIRSAWNAMRALQNKPLRRRKLDIHYSIPKDNPSEKDINQGMLVVFNVDPSVTNNDIHQIFSDYGEIKEIRDAPQKGHHKIIEFYDVRAAESAVRALNRSDLAGKKIKLETGRLSAARRLTQHMSKELGQEEFGVCKLGSPSTNSPPLASLGSSNMAAMTSSGRENGSIHGLHSGLLTSMSPFREASFPGLSSTIPQSLSSPIGIASAATHSSQASLGELSHSLSRMNGHMNYGFQGMGALHPHSLPEVHNGANNGTPYNLNTMAPIGVNSNSRTAEAVDSRHLHKVGSGNLSGHSFDRVGEGAMGFSRSGSGPVRGHQLMWNNSNNFHRHPNSPVLWQNPGSFVNNVPSRPPAQMHGVPRAPSHMIENVLPMHHHHVGSAPAINPSLWDRRHGYAGELTEASSFHPGSVGSMGFPGSPQLHGLELNSIFSHTSGNRMDPTVSSAQISAPSPQQRGPMFHGRNPMVPLPSFDSPGERMRSRRNDSGANQSDNKRQYELDVDRIMRGEDSRTTLMIKNIPNKYTSKMLLAAIDESHKGTYDFIYLPIDFKNKCNVGYAFINMTNPQHIIPFYQTFNGKKWEKFNSEKVASLAYARIQGKTALIAHFQNSSLMNEDKRCRPILFHSEGPNAGDQEPFPMGTNIRARSGRSRTSSGEENHHDIQTVLTNGDTSSNGADASGSTKDTE

SEQ ID NO: 308 - DNA, 2790 bp, Sorghum bicolor
tacccatgtgaataatcaggatgagattgatgatgatatattttgtactggaggtggaatggaattggaagcagatggaaatagcaaatcgtcaaaatttaatggcggaactagttatagtcagactaggtcaattgtccaactgaatggtgagcgaccctcgagaatcctttttgtcggaaacattgatagaaacattgaggattctgaattgaaactcatgtttgagcaatatggagacatgcagacacttaatgcttcttgcaaacatcatggttttgtgatggtatcttactatgatgtaagatcggcggaaaatgctatgagggcccttcaaagcaagtcactcagatgtaggaaacttgacatacattactccattccaaaggactatcctttggagaaagatatcaaccaggacatggtaatagttaaccttgacccctcaataactaatgatgatctgcaccagatatttggtgtccttggtgaaatcaaggagattcaccctatttcagacaatgatcattacagatcgatagaattttttgatgtcagagcagctgaagctgcgcgatatgccttaaacaggagtgaaattgcaggaaataaaatcaaattggagcctggctgtctggatggtactaaacgtttgatgcagcagatgtctcgcgtgttggagcatgaacggtttggtggatgcaaactgggaagcccaaacagtccttcaccatgctttggttccatcaatatggcatccatcagatccactggcacagatagtggaactgttcaggttttacattctagagttcagacaccgacaaaccaattccaagagggaagaagttttctggatcttccctcaactaccataagaaatagatcctctcctgttggaattgcaactgcaggatcacaaagcagccaccatgttcttgatgagcacatccattcacttggaaagatgaatgtacagaacaaggggcgaatggattgtggctttcaagagagtattgctttccatcctcattctctccctgacttcaatgacagactaagaaatggtatcccctatagctgctcaatacctcccatcggtgttaagagcaatgctagagctcctgaagcaatggatggcaggcatatgtacaaaggaggctgtgggaatctcagcaatcaatcttctgctcatactgaagcacttggattttcaagaactggcagcttccctctccatggtcaccaactagcacggagtaattctaataacctacatcagcagcattcttctcccatgctatggcctagcacgggcccatttaccaataatgtatcatctcgccagttgatgcaagtgcatggaatttcaagagcaccattgcgcatgcttgaaaataccatccctatgaatcatcaacatgtgggatctgccccagctgtcaatccatcaatttgggatagacgacatggatatgctggagagatgatggaagcaccaggattcaaccctgggagtgttggaagtatgggtttccctggtagcacacatctgcatcagttggaaaccaatggtatgtttcctcacagtggagggactttcatggacccagctttgtctcctgcacacatgagtgctccctctcctcagcggagggggcatattttccatcgaaggagccatgtggcaactattccatcctcattcgattctgctggtgaacggatgcggagccgaagaaacgactcgaatgtaaatcaatctgacaataaaaggctgtttgagcttgacattgagcgtatagtccggggcgaggactcccggactacactgatgataaagaatatcccaaacaagtacacatcaaagatgctcctggcagctattgatgaaagtcaccggggaacttatgattttatctacctgccaattgactttaagaataagtgcaatgttggttatgcattcatcaacatgatcaatcctgacaatattgttccattttataagacatttcatgggaaacgatgggagaagttcaacagtgagaaagtggcctcacttgcttatgctagaatccaaggaaaatcagctcttgttgctcatttccagaactcaagtttgatgaatgaggataaacgctgccgccctatactcttccactctgatggtccaaatgcaggagatcaagaaccattccctgtgggatcgaatgtccgttccaggcctggaaggtccaggattttgagctgggaacaaaaccaccaggacattgcatcggatcataccaaaggtggaactcctccgagcaggggtggtggcactctaggttacatcgccacagacactgatcatatggctgtcgcttgaagaacttaccacatcacccaaccttctgacaattgcaatccagttttttttttgaaattgcatcctcacccacccctttgctccttttgttatgttgtatctatatctacttccgcgtgatattttgggcaccggaggctctctagacggctgcagatttggtcgctgacaaagtaacgaggagatggacgttgtgccgctcagtttctcctaaggcctgatcgaagcattgtcgttaacttttaactgagagttgttgctttggaaggcgaaaggcgcacggactgcttcgagattttgggtagtgctgtaagatgtaacccagtgttgtacaggtgctgtaagaatggttcactagagggaacaagacacaagaatgtccacttttttgggtgatgtcaattgtcaactttttatgc

SEQ ID NO: 309 - protein, 770 aa, Sorghum bicolor
MELEADGNSKSSKFNGGTSYSQTRSIVQLNGERPSRILFVGNIDRNIEDSELKLMFEQYGDMQTLNASCKHHGFVMVSYYDVRSAENAMRALQSKSLRCRKLDIHYSIPKDYPLEKDINQDMVIVNLDPSITNDDLHQIFGVLGEIKEIHPISDNDHYRSIEFFDVRAAEAARYALNRSEIAGNKIKLEPGCLDGTKRLMQQMSRVLEHERFGGCKLGSPNSPSPCFGSINMASIRSTGTDSGTVQVLHSRVQTPTNQFQEGRSFLDLPSTTIRNRSSPVGIATAGSQSSHHVLDEHIHSLGKMNVQNKGRMDCGFQESIAFHPHSLPDFNDRLRNGIPYSCSIPPIGVKSNARAPEAMDGRHMYKGGCGNLSNQSSAHTEALGFSRTGSFPLHGHQLARSNSNNLHQQHSSPMLWPSTGPFTNNVSSRQLMQVHGISRAPLRMLENTIPMNHQHVGSAPAVNPSIWDRRHGYAGEMMEAPGFNPGSVGSMGFPGSTHLHQLETNGMFPHSGGTFMDPALSPAHMSAPSPQRRGHIFHRRSHVATIPSSFDSAGERMRSRRNDSNVNQSDNKRLFELDIERIVRGEDSRTTLMIKNIPNKYTSKMLLAAIDESHRGTYDFIYLPIDFKNKCNVGYAFINMINPDNIVPFYKTFHGKRWEKFNSEKVASLAYARIQGKSALVAHFQNSSLMNEDKRCRPILFHSDGPNAGDQEPFPVGSNVRSRPGRSRILSWEQNHQDIASDHTKGGTPPSRGGGTLGYIATDTDHMAVA

SEQ ID NO: 310 - DNA, 3211 bp, Sorghum bicolor
gccatttctctctccctccctcgtcaatcaattcctcacaacccaacagaaccacaggagaacagcctgctcggagctcggagtcgagttgagaagaagaagaagaattgaaaacaagacagtttgcagcagcctctgggtcgtctcctcgggctccggccggcgacccctcgcccccgacgaggaagcagtgtgctgcattgccattgcatcaggcgacctagaggaagcagttaatggtccagaggaggggccataacctccagccgtttcagtttttgacttgagagttgcttgggtttcctcaacaaacacactggtggagtgccgtgccatacgcagacaactaacttagccctgccaaataaaacaagagacggagcttcctgtaatcctgcacctatggtgatagcatccggagccgttgacaggagccacctgtccccgtttgttcccctgtcagaatcctcatcttcatcattcttctcccaggatctcgtccccactgagaggcaagttggattctggaaatcatcagggtcaatggtccatcacaaagggagcgagcctattttcacttctccacttgataaggtccatccgatgggctcaagtcctgcaggtggtctggaacatcagcaaggtcaagcctttaaggggcagatgggcatgcttaaccttggtaatttggtgggtcaacaagaaaatgctcctggcataccatcgatttcttgggacgatgtcctcagtagctccaggtccagtcttggcttgtctactggagggacagcttttgttggaccaactagtgctgatcaacatgtgcatgactatggagactgcccttcatccagctcctacaccgaagtcttcagtagcaaatcagcaagattggtggcaagtggcgtttatggtcaatcagctgatgcaaatggttctggttgtgagggagatgaacctctagggtccatgaaagaattggaagctcaaactattggagatctccttcctgatgacgatgacttgatatcggggattatagatggcttcgaatacactggcttgtctaacaaggatgatgctgatgaagatatattctacactggaggaggtttggagctagagcatgatgattccaacaatgtcgacaaatttcgtgaagtgtccttcaaaagtcaactttctggcgatgtcaacgagatctacaaggctcctacaagctgcaataagaaatttgtagaattctataataccagagcagcacaagaaacactgaatgacctcaacaagggtgacatgtcatgctcacaaatcaaggttgagcatagctattctggaggagcaggatcttgcttcacagagcaatgttctggagaacagaagcaaaatgccgtacctcaccaacttaagaactctccacttgggaccattgggaagttagaccctaaaagttgggagggcagcactgttcgtaatttatattctccagttagaccacaacacgataaagcacaacatggcttctctgtgaatgctcctcagaagttgtcatcgcctatcagaattgaatctacacgacagcacagtaatcaaactgctcttggtgaacctagtggatcgcttggtcatggcaactttggaggtggactgcaagccttccacccacactcactgccagagtatcataatggtatttgcaatggctctaactccatgacattaaatgcaaggaattctaacttcagattaactgaaggaatggactacaataatcacaaagttgaccacagtgaccttcatggtcattcctctgatcaaaatgaagcatttagagctactggaattggaagttgcccccttcatggacatcactatacttggagtaactcaaatggatttcctcaaagcccctctgctccaatgctgtggtctaactttcagcaaccagtgcatgtgaattgttaccctgttatgcctcctcacatgcggcgcactgctgcccatcctatggaccaacatcacttgggttcagctccaaacagtgttggtggtttcgcaaatgcacattcttttcatccagggtcccttgaaagtgtagggtttcctggcagccctcagctgtatccagatctctctgtatttgcatctgccagaggaaattacagggagaccatgttctcccccgtaagtgctgggtttccatcaattcagcaaatttttcatgcgaccaacggaaggaatcctatggtgcatgtttccacatcatatgatgccactaatgatcggataaggagccgcaggcatgatggaaatgctgcccagtctgaaaacaagaagcagtttgagctggaccttgaccgcatagctaagggtgaagattcgcgcaccacactgatgataaaaaacattcctaacaagtacaactgtaagctgcttttggctgtcattgatgagaatcaccgaggaacctatgatttcatctaccttccaattgattttaagaacaaatgtaacgttggctacgctttcatcaatatgacagatccacagcacataattccattttacaagacattcaacggcaagaaatgggagaagttcaacagtgagaaagtggcatcacttgcatatgccagaatccagggaaggaatgctttgattgctcattttcagaattcgagcctgatgaacgaagagaaatggtgccgccctatgcttttccacaaagatggtccacatgcaggagatcaggagccattccctgtgggtagcaatgtccgttctcggtctgggagaaacagaccactcactggttcagagactactaaagagggaagtccatcaacctctcctaactaaagagaagctggctcccaatccaactgaggacaggcggtatttgcccactaactggaggctgaagagcctgtaataaatcatccccagttttgcttttgttgcttttttttttttttgtcctcgtcagcaaggcagtgacttgttgagtgtgacaattaatgagaattctgctctgcatgagcctgctgaagatttcaccctaaattaccttggttttgccctaccgttgagcaagctatgtgtcaacggcaacaggtatgtagaagagctgaagtggtggagagggagaggtgtgtgtttcaggcgggtgaaattgaagttgtacagttgaactcaccaggattggaaatgg

SEQ ID NO: 311 - protein, 818 aa, Sorghum bicolor
MVIASGAVDRSHLSPFVPLSESSSSSFFSQDLVPTERQVGFWKSSGSMVHHKGSEPIFTSPLDKVHPMGSSPAGGLEHQQGQAFKGQMGMLNLGNLVGQQENAPGIPSISWDDVLSSSRSSLGLSTGGTAFVGPTSADQHVHDYGDCPSSSSYTEVFSSKSARLVASGVYGQSADANGSGCEGDEPLGSMKELEAQTIGDLLPDDDDLISGIIDGFEYTGLSNKDDADEDIFYTGGGLELEHDDSNNVDKFREVSFKSQLSGDVNEIYKAPTSCNKKFVEFYNTRAAQETLNDLNKGDMSCSQIKVEHSYSGGAGSCFTEQCSGEQKQNAVPHQLKNSPLGTIGKLDPKSWEGSTVRNLYSPVRPQHDKAQHGFSVNAPQKLSSPIRIESTRQHSNQTALGEPSGSLGHGNFGGGLQAFHPHSLPEYHNGICNGSNSMTLNARNSNFRLTEGMDYNNHKVDHSDLHGHSSDQNEAFRATGIGSCPLHGHHYTWSNSNGFPQSPSAPMLWSNFQQPVHVNCYPVMPPHMRRTAAHPMDQHHLGSAPNSVGGFANAHSFHPGSLESVGFPGSPQLYPDLSVFASARGNYRETMFSPVSAGFPSIQQIFHATNGRNPMVHVSTSYDATNDRIRSRRHDGNAAQSENKKQFELDLDRIAKGEDSRTTLMIKNIPNKYNCKLLLAVIDENHRGTYDFIYLPIDFKNKCNVGYAFINMTDPQHIIPFYKTFNGKKWEKFNSEKVASLAYARIQGRNALIAHFQNSSLMNEEKWCRPMLFHKDGPHAGDQEPFPVGSNVRSRSGRNRPLTGSETTKEGSPSTSPN

SEQ ID NO: 312 - DNA, 3920 bp, Solanum lycopersicum
ttcaatttcatttcatttttctctgttcggacattaatccatccactttattgtttttcctacaaactatttctctctcctctctctctccatttctccaacagaaaccggcgttgggatctccgccggaaaacttcaccaatttccgatcggagattatgaatgtttagctgtggagaaaattataaacaatttagcaagaggagagagagatattacaggtggttttaacgtgcaatgtaggaaaaacacatacacaacaggagagagaagaagaagaggatagagatagagagagaaaggcatcgaagctttggaggtttctgcacggcacggatacctagatctcttcttcaatttcccttccttaccttgccttgccttgtgccgtaatttattcctaaactctctgttctctcttcctaatctttatagctacctctcatcccttccaattttttatctctctcatcattctcttgtctacagaaatacttcgaaacaggatcttcttcaagcttcttacaaggttgatgtatttcgtcgtctgattgaaagaagggattctaacttcgattatataattccttctgtatccaacttgcatcacaccatctcaaatgagagagctacagggtttatccccatcatcttacttctccgaggaattatgttttcgtgatgagagacaagttggattttggaaggcaaatagcctgcagaactatcatggtcttaaaagtgatgatgctttacaaagagctgctgttcgttcatcaccctttgagaatcatatttcgttgggctccccgacgacgaagcattttgaacatcatgattctcatctaaaacaagacaaaaatgttaacagtatcatagaaagacgagctgttggaatagaaagagcatctcactccttacctagaggtcttgactataacgtgggtgtaagatctattgtcagcactgacttggcatcttatccaacagaagatgacaaaattagcgtattgggcggtcaatgtgagaatggtctcttctcgagctcattatcagagttattcagtagaaaattgcgattaccgaccaactattccccacatggccattctgttggagcagctgactcacactatgaagaagaacgttttgagtcccttaaagaacttgaggcccacgctattggaaatcttctccctgatgatgatgacttgcttgctggggttactgatgggctagactatgttggccaaccctatgctggtgatgaaactgaggatcttgatcttttcagtagtgttggaggtatggacctaggagaagatggttcctctacaggacaacaaaattctgaatatgctgggaattatactctgcctttgggagactctaatgctgcaattggtagccagaaacctttcgaggaaaatccatctagaacgctctttgtaagaaatgtaaatagcagtgttgaagattctgaactacaaactctttttgagcaatatggagatattcgcacgctatatacagcatgcaaacatcgcggttttgttatgatatcttattatgatattcgagcatcacagaatgccatgaaagctcttcagaacaatccactgagacgcaggaagctagacatacatttctctattcccaaggacaatccatcagaaaaaaatgccaaccaagggactctcctggttttcaaccttgattcctctgtttcaaatgatgaacttcgacaaatatttggtgtatatggggagattaaggagatccgcgagactcagcatagaagccatcacaaatatatagagttttatgatgttagagctgcagaagctgctcttcgtgctttaaacaggagtgacgttgcagggaagcagataatgattgaagcaatccatcctggtggtaccagacggttgtcgcagcaatttccttctgagctggagcaagatgaacctggtctttatttgcaccagaatagtcctagcagtttagccactggattttctgttccaggagcacttccacatggaggacatggtttgagtatggaaaatggatctattctgggcagacaatcagccagtggttctgccatgaattcctatttggataatgcatttgactgtggattatcattcagtgttcctaacagcttattgaggttggaatctaaggggggcaaccaagctaatgttggtgaaactggccacctgcagagccaattcaattttgaccttcggggcacatcaggtctccatcctcattctctgccagagtaccatgatggtttatctaatggaacgacctccatttctccgggcggcatttctgcaaatatgaatatcaggccactagaagcaatagaaaaccgaaagttctccagagttggccctaatgggcaaccggttgaactaaatgaagtttttactccaaatggaactgcaaattgtccttctcctgggcaccaatacatgtggagtaattcacatcaatcgcagcctcaaggcatgatgtggccaaactcaccaacatatgtaggtggggtctgtgcttctcgccctcaacaactgcattcagttccaagggctccgtcccacatgctcaatgcacttgtaccaataaacaaccatcatgtgggttcagcgccctctgttaatccatccctctctctctgggatagaagacatgcctatgcaggagaatctccagatgcatctggttttcatccaggttctctgggaagtatgaggatttctggaaattcaccacatcctttggagttcattcctcataacgttttctcgcgcactggtggcagctgtatagacttgcccatgtcttccagtaatgtcggccatcagcagagaaatttaatgtttcctggtagagctcaaataattcctatgatcagttcgtttgattctccaaatgaaaggatgcggagccgtaggaatgaaggcaattcaagtcagactgacaacaagaagcagtttgaactggatattgaacggattgcacgaggggacgataaaaggacaaccctaatgataaagaatattcctaacaaatatacttcaaaaatgcttttggctgcaatagatgagcgtcacagaggaacatatgatttcatctatctacccattgatttcaagaacaaatgcaacgtaggctatgcgtttatcaacatgactgagccttctcttattgttccgttttatcatgcattcaatggaaagaaatgggaaaaattcaatagtgagaaggtggcatcacttgcatatgctcgcattcagggaaaatctgcactcattgctcacttccagaattctagcctgatgaatgaagataagcgatgccgaccaatcctcttccacactgatggccctaatgctggtgatcaggtgccgtttcccatgggtgtaagcatgaggccaagaagcagcaaaaatcgagctggcacgagtgaggaaagctaccaagagagcaaggatttcataattgaagagtctgttaatgaatcaaattgaggaagctgctgcaattttgttggtactaacctactaataggaggattttggaactggaaagaaatatccacccaatttttattaatgtacattagggtggtcatggaaagacgagaagaaaaaaaaagttgtatttttatgaattttgggacaagactcctaaaatagtcatgaaaattgaggcatctcagtggagcttcaaaattttgcaagatttgggaggctactaattcatatatgagtttccatgtattcataaaacatttgcggcacaaatggagggttttcttgtatctctttctctctcctggcattttccatatcttttttgtcaactgacaatattattaagaaatattttttcttatctctcctgcc

SEQ ID NO: 313 - protein, 973 aa, Solanum lycopersicum
MRELQGLSPSSYFSEELCFRDERQVGFWKANSLQNYHGLKSDDALQRAAVRSSPFENHISLGSPTTKHFEHHDSHLKQDKNVNSIIERRAVGIERASHSLPRGLDYNVGVRSIVSTDLASYPTEDDKISVLGGQCENGLFSSSLSELFSRKLRLPTNYSPHGHSVGAADSHYEEERFESLKELEAHAIGNLLPDDDDLLAGVTDGLDYVGQPYAGDETEDLDLFSSVGGMDLGEDGSSTGQQNSEYAGNYTLPLGDSNAAIGSQKPFEENPSRTLFVRNVNSSVEDSELQTLFEQYGDIRTLYTACKHRGFVMISYYDIRASQNAMKALQNNPLRRRKLDIHFSIPKDNPSEKNANQGTLLVFNLDSSVSNDELRQIFGVYGEIKEIRETQHRSHHKYIEFYDVRAAEAALRALNRSDVAGKQIMIEAIHPGGTRRLSQQFPSELEQDEPGLYLHQNSPSSLATGFSVPGALPHGGHGLSMENGSILGRQSASGSAMNSYLDNAFDCGLSFSVPNSLLRLESKGGNQANVGETGHLQSQFNFDLRGTSGLHPHSLPEYHDGLSNGTTSISPGGISANMNIRPLEAIENRKFSRVGPNGQPVELNEVFTPNGTANCPSPGHQYMWSNSHQSQPQGMMWPNSPTYVGGVCASRPQQLHSVPRAPSHMLNALVPINNHHVGSAPSVNPSLSLWDRRHAYAGESPDASGFHPGSLGSMRISGNSPHPLEFIPHNVFSRTGGSCIDLPMSSSNVGHQQRNLMFPGRAQIIPMISSFDSPNERMRSRRNEGNSSQTDNKKQFELDIERIARGDDKRTTLMIKNIPNKYTSKMLLAAIDERHRGTYDFIYLPIDFKNKCNVGYAFINMTEPSLIVPFYHAFNGKKWEKFNSEKVASLAYARIQGKSALIAHFQNSSLMNEDKRCRPILFHTDGPNAGDQVPFPMGVSMRPRSSKNRAGTSEESYQESKDFIIEESVNESN

SEQ ID NO: 314 - DNA, 2933 bp, Oryza sativa
tttgtacaaaaaagcaggcttaaacaatggtgatagcttctggagctattgacaggaggcacctgtcgccattcaccccaacttcagacgactcctcatcttcattcttctctcaggaccttgtccctacagagaggcaagttggattttggaattcagagtcaatggtggatcacaaagggagcaagtcagtttttgcttctccacttgaaaagatccaacccaatggagcaaatcatgcaggagatccggaaactccaggaggtcaagccttcaagggcctggacatccttagcctcagcaatttgatgcggcaagaaaatgcttcaggttcaccgtcactttcttggggtgagatcctcacaaaccccatatcgaggcttggcttgtctacaagagaaacagcttttgttgaaccaactactgctgatcaacatgtgcctggttatgggaagggactttcatccagctccctctctgaagtattcagtggcaaatcgagagaaatagtaagtggtgttctttgtcaatctactgggacacatacctccatctacgacagtgatgaacctctagagtccatggaagcgatagaagctcaaactattggagatctccttcctgatgatgatgatgatttaatatcaggtattgccgatggatttgaatttactggcatgtcgaccaaccaggatgatgccgatgaagatatattctgcactggaggaggaatggaacttgaaaacaatgattccgtaaaaggtgacaaagttcaggatggatccctcaagagccaaatttcttcaggacactccatcaataaacaaccttcccgaactcttgtagtcagaaatattactgctaacatcgaggattctgatctgacggttctgtttcagcaatacggggacattcgcatgctctatacctccttcaagcaccatgggtttgtaactgtttcttattatgacataagagcagcccaaaatgcaatgagagcgctgcatagcaagcctctggggctgatgaaacttgatgtgcaattttcttttcctaaggaaaatgttccaggcaaggatattgataagggaatgttggtggtatctaacattgattcttccatctccaatgatgatcttctccaaatgctcagtgtttatggtgatgtaaaggagatttccagctctcctataagctgcaccaagaagtttgtagagttctatgatgttagagcagcagaagaagcactacatgaccttaataagggtggaatttcaggcccaaagttcaaggttgaacttagccaacatggagaggcaggatcttgcttgaggcagcaacattctagagaatggaagcaagacagtttgcctcaccaacctaaaaactcttcacctgggaccattggaaagttgggcaccaaatgtcaggacaacagcactgttcataatttattttctccagttaaccaacaattggagagcccaacccagtgcatctctacgactggtcctcaaattttatcttcacctatcagaattaaatctacacttcagcacaataatcaagcctctgttggcgatcttagtggacctcttggtcaaggaaactttggacgtggaatacaaaccctccacccacgctcattgccagagcatcacaaccgcatttgtaataactctaagtccatgacagtaagtggtaggaatgctagctctagacaagacggagtggatcacaatatccaaaaagtgggccctgctggtttttgcggtcattcttttgatcaaaataatgaagcatttggctttactgaaattggaagttgcccccttcatggatatcactacacctggaaccacacaaatgtttttccacaaagtccctcagctccaatactgtggtcgaacttgcagcacccaatgcacgtgcatagttaccctggtgtgccgcctcacatgctgaacacaggttcttatcccatggaccagcatcacttgggttcagctcctgacaatggaggcagttttggaaatgtgcactcttttcatccaggatctctcggaagcataggtttgcatggtagccctcagttatatccatcagaattatctgcctttgcatccagcagaggaaattttagggaggccttgttctccccagttggcggtggatttcaatcccttcagcaaatgtgcaatgcaatcaatggtcggaatcctatgatccatgtttccacttcatacgatgctactaatgatcggatgaggagtcgcagacatgatggaaatcctgcacagtctgaaaacaaacggcaatttgagcttgacattgatcgcatagcaaagggtgaagattcacgcaccaccctgatgatcaagaacataccaaacaagtacaactgtaagctgcttttggctgtcattgatgagaaccaccgtggaacctacgatttcatctatctcccaattgattttaagaacaaatgtaatgtggggtatgcttttatcaatatggctgatccgcagcacataatcccattctataagacatttaatggcaagaaatgggagaaattcaatagtgaaaagatggcgtcgctcgcatacgcccggattcaaggaaggagtgctttgattgctcattttcagaattctagcctgatgaatgaagacaaatggtgtcgacctatgcttttccacaaagatggtccaaatgcaggagatcaggagccttttcctgtggggaacaatgtccggtctagggctgggagaaataggccgctcatcagcttggacactaaagatgcaagtccatcaagctccccagaccaagaaagcaattctgtcggcaccgcgaactcaacttgccgtacgaccttggagcaaacctaatcactaactggagggcacacccagctttcttgtacaaag

SEQ ID NO: 315 - protein, 955 aa, Oryza sativa
MVIASGAIDRRHLSPFTPTSDDSSSSFFSQDLVPTERQVGFWNSESMVDHKGSKSVFASPLEKIQPNGANHAGDPETPGGQAFKGLDILSLSNLMRQENASGSPSLSWGEILTNPISRLGLSTRETAFVEPTTADQHVPGYGKGLSSSSLSEVFSGKSREIVSGVLCQSTGTHTSIYDSDEPLESMEAIEAQTIGDLLPDDDDDLISGIADGFEFTGMSTNQDDADEDIFCTGGGMELENNDSVKGDKVQDGSLKSQISSGHSINKQPSRTLVVRNITANIEDSDLTVLFQQYGDIRMLYTSFKHHGFVTVSYYDIRAAQNAMRALHSKPLGLMKLDVQFSFPKENVPGKDIDKGMLVVSNIDSSISNDDLLQMLSVYGDVKEISSSPISCTKKFVEFYDVRAAEEALHDLNKGGISGPKFKVELSQHGEAGSCLRQQHSREWKQDSLPHQPKNSSPGTIGKLGTKCQDNSTVHNLFSPVNQQLESPTQCISTTGPQILSSPIRIKSTLQHNNQASVGDLSGPLGQGNFGRGIQTLHPRSLPEHHNRICNNSKSMTVSGRNASSRQDGVDHNIQKVGPAGFCGHSFDQNNEAFGFTEIGSCPLHGYHYTWNHTNVFPQSPSAPILWSNLQHPMHVHSYPGVPPHMLNTGSYPMDQHHLGSAPDNGGSFGNVHSFHPGSLGSIGLHGSPQLYPSELSAFASSRGNFREALFSPVGGGFQSLQQMCNAINGRNPMIHVSTSYDATNDRMRSRRHDGNPAQSENKRQFELDIDRIAKGEDSRTTLMIKNIPNKYNCKLLLAVIDENHRGTYDFIYLPIDFKNKCNVGYAFINMADPQHIIPFYKTFNGKKWEKFNSEKMASLAYARIQGRSALIAHFQNSSLMNEDKWCRPMLFHKDGPNAGDQEPFPVGNNVRSRAGRNRPLISLDTKDASPSSSPDQESNSVGTANSTCRTTLEQT

SEQ ID NO: 316 - DNA, 3061 bp, Oryza sativa
tttgtacaaaaaagcaggcttaaacaatgccatctcaggtcatggatcagaggcatcacatgtcccagtacagccaccccaccttggctgcatcctccttctcggaggagcttcgtctccccacagagaggcaagttggattttggaagcaggagtcattacctcatcacatgggaagcaagtctgttgcatcttcaccaattgaaaaacctcaacctattgggacaaggatggctggtcgactagaacttctacaaccatataaactaagagaccagggagctgcatttagccttgagcacaagctattcggtcaagagaggcatgctaacttgccaccatctccttggagacctgatcaagaaactggccgccaaactgattcatctttgaagtcggcagctttattttctgatgggaggattaatccgaatggtgcctataacgagaatgggcttttctcaagctctgtatcagatatttttggcaagaaattgagattaacatccaagaatggtcttgtcggtcagtcaattgaaaaggttgacctaaaccatgttgatgatgagccctttgagttgaccgaggaaattgaggcccaaataattggaaatcttcttcctgatgatgatgaccggttatcaggtgttgttgatgaagttgggtatccaaccaacgctaacaaccgggatgatgctgatgatgatatattctacactggaggcgggatggaactcgaaactgatgaaaataaaaaactgcaagaatttaatggcagtgctaatgatggaattggtttgttaaatggtgtgttgaatggtgaacatctataccgggaacagccttcgagaactctttttgttcgaaacattaatagtaatgttgaggactctgaattgaagctcctatttgagcatttcggagatatccgtgccctttatactgcctgtaaacatcgtggttttgtgatgatatcttactatgatataaggtcagcgctgaatgccaagatggagcttcaaaacaaggcactgaggcgtaggaaacttgacatacattattccattccgaaggacaatccttcggagaaagatattaaccagggaactattgtactttttaacgttgacctatctttaacaaatgatgatctacataagatctttggtgactatggtgaaataaaggagattcgtgacactccacagaagggtcatcacaaaataatagaattttatgatgtcagagcagctgaagctgcacttcgtgcattaaacaggaatgatattgcaggcaagaaaatcaaattggagaccagccgtctgggtgctgctaggcgcttgtcgcagcatatgtcttcagaattgtgtcaggaagagtttggtgtatgcaaactggggagtccaagcacaagtagccctccaattgcttcgtttggttctactaatttggcaacaataacttcaactggtcatgaaaatggaagtatccagggtatgcattctggacttcagacatcaataagccagttcagagaaacatcttttccaggcctatcttctaccataccacaaagtttgtccactccaattggaatttcatccggtgcaactcatagtaaccaggctgcccttggtgagatcagccaatctctaggtcggatgaatgggcatatgaactatagttttcagggcatgagtgctcttcatcctcattctctgcctgaagtccacaatggagtgaacaatggtgtcccttacaacttaaacagcatggcacaagttgtcaatggaaccaactcgaggacagctgaagctgtggacaacagacatctccataaagtgggttccggcaacctcaatggacattcatttgatcgtgcggaaggagctcttggattttcaagaagtggaagttcttctgtccgtggtcaccagttaatgtggaataattcaagtaacttccatcatcacccaaattctcctgttctatggccaagccctggatcatttgtaaacaatgttccatctcgctcccctgcacaaatgcatggagttccaagagcaccatcgtcgcacatgattgacaatgtgcttcccatgcaccatctccatgtaggatcggcaccagcgatcaacccatcactttgggataggcggcatggctatgcaggggaattgacagaagcaccaaatttccatcctggtagtgtgggaagcatgggatttcctggtagtcctcagcttcactcgatggagcttaataacatataccctcaaactggagggaattgcatggacccaactgtgtctcctgcacagattggtggtccatctcctcagcagagaggttcgatgttccatggaaggaatcctatggttccccttccatcctttgattcacctggtgaacggatgaggagccgaagaaatgattcaaatggtaatcagtctgataataaaaagcaatatgagcttgatgttgaccgcattgttcgtggtgatgactcccggactacgctgatgataaagaatatcccaaacaagtacacctcaaagatgcttctagctgctattgatgaaaatcataaagggacttatgattttatttacctaccaattgacttcaagaacaagtgcaatgtaggctatgctttcatcaatatgaccaatcctcagcatatcattccattttatcagacgttcaatggcaagaagtgggaaaagtttaacagtgagaaagtggcatcacttgcttatgctagaatccaagggaaatcagctcttattgctcacttccagaactccagtttgatgaatgaggacaagcgctgccgccccatactattccattcggatggtcctaatgcaggagatcaggaaccattccctatgggtacaaacatccgagccaggtcagggagatcgcgagcttcctctggcgaagaaagccaccaggacatctcaatcacctcggttaattgtgacacttctaccaatggagttgatactacagggcctgccaaggactgagtaacacaacccagctttcttgtacaaag

SEQ ID NO: 317 - protein, 1001 aa, Oryza sativa
MPSQVMDQRHHMSQYSHPTLAASSFSEELRLPTERQVGFWKQESLPHHMGSKSVASSPIEKPQPIGTRMAGRLELLQPYKLRDQGAAFSLEHKLFGQERHANLPPSPWRPDQETGRQTDSSLKSAALFSDGRINPNGAYNENGLFSSSVSDIFGKKLRLTSKNGLVGQSIEKVDLNHVDDEPFELTEEIEAQIIGNLLPDDDDRLSGVVDEVGYPTNANNRDDADDDIFYTGGGMELETDENKKLQEFNGSANDGIGLLNGVLNGEHLYREQPSRTLFVRNINSNVEDSELKLLFEHFGDIRALYTACKHRGFVMISYYDIRSALNAKMELQNKALRRRKLDIHYSIPKDNPSEKDINQGTIVLFNVDLSLTNDDLHKIFGDYGEIKEIRDTPQKGHHKIIEFYDVRAAEAALRALNRNDIAGKKIKLETSRLGAARRLSQHMSSELCQEEFGVCKLGSPSTSSPPIASFGSTNLATITSTGHENGSIQGMHSGLQTSISQFRETSFPGLSSTIPQSLSTPIGISSGATHSNQAALGEISQSLGRMNGHMNYSFQGMSALHPHSLPEVHNGVNNGVPYNLNSMAQVVNGTNSRTAEAVDNRHLHKVGSGNLNGHSFDRAEGALGFSRSGSSSVRGHQLMWNNSSNFHHHPNSPVLWPSPGSFVNNVPSRSPAQMHGVPRAPSSHMIDNVLPMHHLHVGSAPAINPSLWDRRHGYAGELTEAPNFHPGSVGSMGFPGSPQLHSMELNNIYPQTGGNCMDPTVSPAQIGGPSPQQRGSMFHGRNPMVPLPSFDSPGERMRSRRNDSNGNQSDNKKQYELDVDRIVRGDDSRTTLMIKNIPNKYTSKMLLAAIDENHKGTYDFIYLPIDFKNKCNVGYAFINMTNPQHIIPFYQTFNGKKWEKFNSEKVASLAYARIQGKSALIAHFQNSSLMNEDKRCRPILFHSDGPNAGDQEPFPMGTNIRARSGRSRASSGEESHQDISITSVNCDTSTNGVDTTGPAKD

SEQ ID NO: 318 - DNA, 3114 bp, Vitis vinifera
atgtctgatcaccatgcacgaatacctggcagcaagtcggttacttcatcgcccttggaaaaacttttaccagttggatcaaagtcagtggattactcggaaggaccagagtcctatctggctagagaccagaaagaaaaactgcaggtaaacagagaagagggaactgctaatttgtctaggactccatggagaactgtggatcacaattcaaaaacatggtcaaatttgtacgtgcagcctgcttcctcttacgtggaagtaaaaaagactagtatcaatggagccctatatgagagcagtctcttttcaagctcattgtctgaaatatttaataggaagttgagagtatcgaccagtgatgttctatctcatcagtctgctggcactgttgctcctcactctgaggaagagaagctctttaaatcccttgaagaaattgaggttcaaaccctcggaaatctccttcctgatgaagatgagctattttcgggagtggttgatgacatggggtataatgctcatgcaaataatggtgatgattttgaagattttgatctgtttagcagtggtggaggcatggaactagaaggggatgatcatttgtgtatcagccaaagacattctgattttaatgggggaattcccaacagtcaaggaggttctaatggctcacttgcaagtgaacacccttatggtgaacacccttccagaacactttttgtgcgaaatatcaacagcaatgttgaagattcagaattaagggatctttttgagcaatatggagacatccgaacactttacacagcttgcaagcatcgcgggtttgttatgatttcttattatgatataagggcagccagaaatgcaatgagagcccttcagaataagccactgagacggaggaaacttgatattcattattcaattccaaaggacaatccttcggagaaagatatcaaccagggtacccttgtggtatttaaccttgattcatctgtttccaatgatgatcttcgtcaaatttttggcatttatggagaaattaaggaaatccgggaaactccacacaagcggcatcacaaattcattgaattttttgatgttagagctgcagaagctgctcttcgtgcattgaacaggagtgatattgctgggaaacggatcaagcttgaaccaagccgtccagggggttcaagacgtttgatgcaactgtgctcttctgaactggagcaagatgaatccattttgtgtcaaagccctgatgacaacttatcatctggttgcatggcggtttctcctggaataaagacatctagctgcatggataatgtatctatccaggacttgcattctgcagttcgaatgcctattggttcatttgttgaaaatgccacttcccatgggagttctagtgttccaaacaccttgccctcaccgatgagagtggtatccatcatcaatgaatttggtcttggtgaaaccagcaacacattggatcagatgaagtttggcaaccaaagttttcctaattaccatcctcattccctccctgagtatcatgataatttagccaatgctattagatacaactcttctagcacaattggggacatgactggtcatgttggtccgagaataacagagggaattgacaacaggcacatccacagagtgggttcaaatgggcacccgattgaacttaatggaggggcttttggctcatctggaaatgggagttgccctgttcatggacttcatcgtgcatggggaaactccagctcgtatcagcatcattcttcaagtcccatgatctggccaaattctccatcatttagtaatggtgttcatgctcaacggcccacacaagtacccggatttcctagacctccacctcatatgctgaacattgtttcacctgtgcaccaccatcatgttggatcagcaccagctgttaatccctccctttgggatagacggcatgcctacagtggagaatctcctgaaacttctggttttcacttgggttctcttgggagtgtgggttttccaggaagttctccattgcatcccttggaaatggcttctcacatctttccccatgttggtggaaattgcatggacatatctgcaaatgtcgggctgcgctctcctcagcagatttgccatgtattccctggaaggaattcaatgctttcaattccctcttcttttgatttgcctatggagcgtgtgagaaacctctcacaccgtagaactgaagccaattccaaccatactgataagaaacagtatgaacttgacattgatcgtatattacgtggggaagactgccgaacgacactgatgataaagaacattcccaacaagtatacttcaaaaatgcttcttgctgcaattgatgaacatcatcgaggaacttatgattttatttatttgccaattgacttcaaaaacaaatgcaatgtgggctatgcttttgtcaacatgattgatcctcttcatattgttccattccatcaggcattcaatggtaaaaagtgggagaagttcaacagtgagaaggtggcatctcttgcatatgctcgaattcaaggaaaaactgctcttattgctcatttccaaaactcgagcttgatgaatgaggataaacgttgccgccctattctatttcatactgatggtccaaatgcaggtgatcaggagccattccccatgggtagcaatatacgatcaagaccaggcaaagctcgaactagtgggggtgaggagagtcagcatcaagggagcccaacaacttctgcaaatggagaggaatcttccaatggagcagtcactttgttgggttctgccaaggactcagattaagcaaactgctttccagagcactaactgtaagaccctatatcaactacaaaaatcatatcatatccatcccagttctgtatttctggggtggcctgacggaatagttttcactatagagatgccccattaaaaattttggtgaccagaatgcatcaccaaaatcgaagggagtttacctcacagttttcttcggttatgtaaaaatttgtattgggtttgatcacgagtacagtgactggcttaaca

SEQ ID NO: 319 - protein, 955 aa, Vitis vinifera
MSDHHARIPGSKSVTSSPLEKLLPVGSKSVDYSEGPESYLARDQKEKLQVNREEGTANLSRTPWRTVDHNSKTWSNLYVQPASSYVEVKKTSINGALYESSLFSSSLSEIFNRKLRVSTSDVLSHQSAGTVAPHSEEEKLFKSLEEIEVQTLGNLLPDEDELFSGVVDDMGYNAHANNGDDFEDFDLFSSGGGMELEGDDHLCISQRHSDFNGGIPNSQGGSNGSLASEHPYGEHPSRTLFVRNINSNVEDSELRDLFEQYGDIRTLYTACKHRGFVMISYYDIRAARNAMRALQNKPLRRRKLDIHYSIPKDNPSEKDINQGTLVVFNLDSSVSNDDLRQIFGIYGEIKEIRETPHKRHHKFIEFFDVRAAEAALRALNRSDIAGKRIKLEPSRPGGSRRLMQLCSSELEQDESILCQSPDDNLSSGCMAVSPGIKTSSCMDNVSIQDLHSAVRMPIGSFVENATSHGSSSVPNTLPSPMRVVSIINEFGLGETSNTLDQMKFGNQSFPNYHPHSLPEYHDNLANAIRYNSSSTIGDMTGHVGPRITEGIDNRHIHRVGSNGHPIELNGGAFGSSGNGSCPVHGLHRAWGNSSSYQHHSSSPMIWPNSPSFSNGVHAQRPTQVPGFPRPPPHMLNIVSPVHHHHVGSAPAVNPSLWDRRHAYSGESPETSGFHLGSLGSVGFPGSSPLHPLEMASHIFPHVGGNCMDISANVGLRSPQQICHVFPGRNSMLSIPSSFDLPMERVRNLSHRRTEANSNHTDKKQYELDIDRILRGEDCRTTLMIKNIPNKYTSKMLLAAIDEHHRGTYDFIYLPIDFKNKCNVGYAFVNMIDPLHIVPFHQAFNGKKWEKFNSEKVASLAYARIQGKTALIAHFQNSSLMNEDKRCRPILFHTDGPNAGDQEPFPMGSNIRSRPGKARTSGGEESQHQGSPTTSANGEESSNGAVTLLGSAKDSD

SEQ ID NO: 320 - DNA, 2880 bp, Arabidopsis thaliana
ctcaattttaattttattttggttggtagagattctctcttttgctcttcgtgctttgtatcgtgatcatcgtcggtgttggtaactgcacatttcagcagatcaaaagaaagaagttgctagaatggatattccacatgaagcagaagctggagcttgggggattctccctggttttggtcgtcaccatcatccctccagtgatgctactttgttctccagttctttacctgttttcccccgtggaaaactgcaattgagtgataacagagatggtttctcactgatagacgatacggctgtttctcgcacaaacaagtttaacgaaagtgctgatgactttgaatctcattccattggaaacctgctccctgatgaagaggatcttttgacagggatgatggatgatcttgacctgggggagttaccagatgctgatgattatgatctttttggtagtggaggaggaatggaacttgacgctgattttcgagacaacttgagtatgagtggtcctccaaggctatcactttcaagtcttggtggaaatgcaattccgcaattcaatattccaaatggtgcaggaacagttgctggtgagcatccttatggtgaacatccctcgagaacattgtttgtccggaatattaacagcaatgtagaagactctgaactcacagctctctttgagcaatacggtgatattagaacgctctataccacttgtaagcataggggatttgtcatgatatcttattatgacattcgttctgctcgaatggctatgaggtctttacagaataagccattaagacgtagaaaattggacattcacttctcaattccaaaggataatccatctgagaaagatatgaatcaggggacattagtggtgtttaacctggatccttcaatttctaatgatgacttacatggaatttttggtgctcatggcgagatcaaagagataagagaaacaccacataagaggcatcacaaattcgtcgagttttatgatgtccgcggtgctgaagcagcattgaaggcattaaacaggtgtgagattgcaggaaaacgtataaaggttgaacctagtcgccctggaggagctcgtcgaagcctgatgttgcaacttaaccaagatcttgagaacgatgatttgcactacctaccgatgattggttcacccatggcaaactctcccccaatgcaaggtaactggccgctgaacagtcccgtggaaggtagtccgcttcaaagtgtacttagcaggtcacctgtttttggcttaagtcctacaaggaacggccacttgtctggtttggcttctgctctaaattcacaaggaccaagctcgaagcttgcacccattggcaggggtcaaattggtagcaacggcttccaacagtcatcacatttattccaagagcctaagatggataataagtacacaggaaatctctctccttcaggtcctttgatctcaaatggaggtggaattgagacgttgtcgggttcagagtttctctggggaagtcctaacgcacgctctgaaccttcaagttcctcggtttggtcaacatcatccactgggaatccactcttctcaactcgagtagaccgatctgttccatttccacatcagcatcaaaatcaaagtcgtagccatcatcacttccatgttgggtctgcaccatctggtgttcctctagaaaagcattttggattcgtcccagagtcttcaaaggacgctttgttcatgaacactgttggtcttcaaggaatgagtggaatgggtctcaacggtggaagtttctcttccaaaatggcaaataatgggatcattaactctggaagcatggccgaaaacggtttttcaagttacagaatgatgtcttcaccgagattcagccccatgttcttaagcagcggtctaaacccagggcggttcgcctctggctttgacagtttgtatgaaaatggtaggcctcgtagagttgagaacaattcgaaccaggttgagagcaggaaacagtttcaacttgatttggagaaaattcttaatggagaggattctcggactaccttgatgattaaaaacattccaaacaaatacacctcgaagatgttgttagctgcaatcgatgaaaagaaccaaggaacttacaactttctctatttgcccattgatttcaagaacaaatgcaatgtgggctatgcattcatcaacatgctcaatccagaactcatcattccattttatgaggcttttaatgggaagaagtgggagaagttcaacagtgagaaagtagcttcattggcatatgctcggatacaaggaaaatctgcccttatagcccattttcagaactcaagcttgatgaatgaagatatgcgttgtcgtccaattatcttcgacactcccaacaatccagagtctgttgaacaggttgttgatgaggaatctaagaatatggacctcctcgactctcagctcagtgatgatgatggcagagagagaagctgacacaggagttgagagacgactcaatgttgtgataatggctgttttttttctttctaagtactaatttttaaccgtacatattggtgaaaggcagagttaactgatgcatgcaggaccctgcggaagtgtgttttcgaattgcaggttttaaatgctgcatgcagaagctgtgcgagtatttactctgttttttttttttttttttctttcttcatgttttttggttccatggagtatatgtaaaaaaaaaaaccatgaatactcggttttatgtgggtattatgttgtaactctcacaactcttgttaaagcttttggcaatttgtacagtaagaaaaaaagaattgtctctc

SEQ ID NO: 321 - protein, 800 aa, Arabidopsis thaliana
MDIPHEAEAGAWGILPGFGRHHHPSSDATLFSSSLPVFPRGKLQLSDNRDGFSLIDDTAVSRTNKFNESADDFESHSIGNLLPDEEDLLTGMMDDLDLGELPDADDYDLFGSGGGMELDADFRDNLSMSGPPRLSLSSLGGNAIPQFNIPNGAGTVAGEHPYGEHPSRTLFVRNINSNVEDSELTALFEQYGDIRTLYTTCKHRGFVMISYYDIRSARMAMRSLQNKPLRRRKLDIHFSIPKDNPSEKDMNQGTLVVFNLDPSISNDDLHGIFGAHGEIKEIRETPHKRHHKFVEFYDVRGAEAALKALNRCEIAGKRIKVEPSRPGGARRSLMLQLNQDLENDDLHYLPMIGSPMANSPPMQGNWPLNSPVEGSPLQSVLSRSPVFGLSPTRNGHLSGLASALNSQGPSSKLAPIGRGQIGSNGFQQSSHLFQEPKMDNKYTGNLSPSGPLISNGGGIETLSGSEFLWGSPNARSEPSSSSVWSTSSTGNPLFSTRVDRSVPFPHQHQNQSRSHHHFHVGSAPSGVPLEKHFGFVPESSKDALFMNTVGLQGMSGMGLNGGSFSSKMANNGIINSGSMAENGFSSYRMMSSPRFSPMFLSSGLNPGRFASGFDSLYENGRPRRVENNSNQVESRKQFQLDLEKILNGEDSRTTLMIKNIPNKYTSKMLLAAIDEKNQGTYNFLYLPIDFKNKCNVGYAFINMLNPELIIPFYEAFNGKKWEKFNSEKVASLAYARIQGKSALIAHFQNSSLMNEDMRCRPIIFDTPNNPESVEQVVDEESKNMDLLDSQLSDDDGRERS

SEQ ID NO: 322 - DNA, 3138 bp, Arabidopsis thaliana
ctacataaataaaataattaaatatccattttttctctctctctttctcagtttttttttttttgggtaagcgtttgctcgttgtgtaatttcccggcaacggaagagaggaggaggaagagtgtaagcaataaattcctcttcttctacgaaacatttgctcttctcctctttctcttctcttctcttctcctttgcttctccgattctcttccttttttttagtttgatccgactactcaagctttttttctgttcatggtttcctccatcatcgcagttgcagaaggcaaaaagatggagctagaacccaataaatcactatctgctgatatgccatctttgctgagtagatcatctgaagcttttaatggaggcactggatatcgttcttcaagtgatctcagcatgttctcaagctcattgcccacactttttcatgaaaagctgaatatgactgattcagatagttggctctcctttgatgaaagctcacccaatctgaacaaacttgtcataggaaactcagagaaagattctttggaagatgttgaacccgatgctttagaaatattgctgcctgaggatgaaaatgagctccttcctggcctcattgatgagcttaattttaccgggttgcctgatgaacttgacgatctcgaagagtgtgatgtcttttgcacgggagggggtatggagttggatgttgaatcccaagataatcatgctgttgatgcgtcagggatgcagatttctgatcgcggtgctgcaaatgcatttgttcctcgtaaacgtcccaatacggctggtagagtttcagtggaacatccaaacggtgaacatccttcaaggacattatttgttaggaatatcaacagcagtgtcgaggattctgagttaagcgccctttttgagccgtttggggagatcagaagtttgtacactgcatgtaaaagcagggggtttgttatgatatcctactacgatattcgagctgctcatgccgcaatgcgtgcactacagaacacacttttaagaaaaaggacactggacattcacttttccattcctaaagaaaatccatcagagaaggatatgaatcaaggaactcttgtgatttttaatgtggacacaacagtatcgaatgatgagctccttcagctgtttggtgcctatggtgaaataagagagattagagaaaccccaaacaggcgattccacaggttcattgagtactatgatgttagagatgcagagacagccttgaaagcactgaatagaagcgagataggtggaaaatgtataaagctcgaacttagtcgtcctggaggggctcgtcgactgtcggtcccgtcacaaagtcaagatttggagagaaccgaagttacaaatttctacaatcaagtaggttcacatgttgctaattctccaccaggtaactggccaattggtagcccagtgaagggctctccttcgcatgcctttacgaggccacatggtctaggaatggtcaggccagttaactcagacaatatgccaggactggcttcaattcttcctgctcatccttctagctttcatggattttcaccagtcagtaatgaccaagggctattgaatcattcaaaccaaactattctgaataagggattgatgcacaacatttcctatgggcaacctcattctttgccagagcatataacagggggaatttccaactccatgaggtttatagctccacactcctcaggattcgggacttcatctgatcaccgctatcgctggggaagccctcctcagcatatgaattatcctggttacactggagtgtcgtcgtcatcgtcatctactgaacgtcctttcactgtcaggcatggttttccatttgctgagaggcaggcttcattgcttggaaaataccagcatcatgtgggctctgctccctcaagcattcattttaatacacaaatgaattgctacacgggatcaccagagataccccttggatttagtgatatgggaatcaacagaaactataacagtgctcatggaaaagcaaaccttggtgttagtctaccggggaacagtagtgaacaggatttcactggctttggcatgtcttcaatgcctacagttcctttcggtgggagtagaggattacaatcagtaaggcctgaaccttttgctgagcagggtaggatacataaccacgagagtcacaatcagaatcagttcatagatggtgggagatatcatatcgacttggataggattgctagtggagatgaaatccgaactacattaatcatcaaaaacatcccaaacaagtacacttacaagatgctggtggctgaaatcgacgaaaagcacaagggagactatgactttctatgcttgccgacagactttaagaataaatgcaacatgggtcacgcttttatcaacatggtctctccattgcacatcgttcccttccaacagactttcaatggtaaaatatgggagaaattcaacagtgggaaagttgcttcattggcatatgcagagatccaaggaaagtctgcccttgcgtcatacatgcagactccaagttctatgaaggaacaaaagcaattgtttccagaagtctcctaccatgatgatggtcaagacgccaatgatcacgagcaactgttttcaagcatttggaacataaccgcgcctgattcagattggtcttacacaatggatcttatcgaaaatccgagggagaacggtaactccaagaatgctgcagaagagtcctcttgaatccccactaaaactagtagttgggaactctaactcaccatcaaaggtaaactaagtgtacaggtctggcgcggttatggaagaaacagaatgtacagtattaaggcttgttttctccacggaacaaagtaaccagtttttagggattacttcactcgaagcaaccgattaaagaaacatccctattagtacattacgttgtatactttatattcggaaacttctctctatatcagtcatgtgtatataacatcctcttgcgtgtacattatcctttccatgtgaaagacatgatcagtatttagttgtacaacaggttcgttataagtttctgtctcaattagttat

SEQ ID NO: 323 - protein, 843 aa, Arabidopsis thaliana
MVSSIIAVAEGKKMELEPNKSLSADMPSLLSRSSEAFNGGTGYRSSSDLSMFSSSLPTLFHEKLNMTDSDSWLSFDESSPNLNKLVIGNSEKDSLEDVEPDALEILLPEDENELLPGLIDELNFTGLPDELDDLEECDVFCTGGGMELDVESQDNHAVDASGMQISDRGAANAFVPRKRPNTAGRVSVEHPNGEHPSRTLFVRNINSSVEDSELSALFEPFGEIRSLYTACKSRGFVMISYYDIRAAHAAMRALQNTLLRKRTLDIHFSIPKENPSEKDMNQGTLVIFNVDTTVSNDELLQLFGAYGEIREIRETPNRRFHRFIEYYDVRDAETALKALNRSEIGGKCIKLELSRPGGARRLSVPSQSQDLERTEVTNFYNQVGSHVANSPPGNWPIGSPVKGSPSHAFTRPHGLGMVRPVNSDNMPGLASILPAHPSSFHGFSPVSNDQGLLNHSNQTILNKGLMHNISYGQPHSLPEHITGGISNSMRFIAPHSSGFGTSSDHRYRWGSPPQHMNYPGYTGVSSSSSSTERPFTVRHGFPFAERQASLLGKYQHHVGSAPSSIHFNTQMNCYTGSPEIPLGFSDMGINRNYNSAHGKANLGVSLPGNSSEQDFTGFGMSSMPTVPFGGSRGLQSVRPEPFAEQGRIHNHESHNQNQFIDGGRYHIDLDRIASGDEIRTTLIIKNIPNKYTYKMLVAEIDEKHKGDYDFLCLPTDFKNKCNMGHAFINMVSPLHIVPFQQTFNGKIWEKFNSGKVASLAYAEIQGKSALASYMQTPSSMKEQKQLFPEVSYHDDGQDANDHEQLFSSIWNITAPDSDWSYTMDLIENPRENGNSKNAAEESS

SEQ ID NO: 324 - DNA, 2724 bp, Arabidopsis thaliana
actcttctcttctccatccaattaaagattctctcttttaataatgctttcaaaagaatatctaatttcaggaataatcaaaaacttatttaatttctctcttctttatcaatgtgtatatataatacacacatatataagaaagtgtttcttctgtattcgtgggagaaacaaacaaaaaacaatttcttctagcgaagaagcagaattaatcaaagttcagagctttcactatgaatatcccaagtggaaccttctcaagatctgatcatttccatgcttcaagtgatgcttctctcttttcaagctctcttcctcttattcaacaccaaaacatcaaccctcgtgacagctaccatcagtctgttgatgaaatggcttctggcttagaccattttagtggaggcattggcaatatgcttgatgatggtgactcacatccaatcggaaacatgcttcctgatgatgaggaagagcttttctctggtctaatggatgatttaaacttaagttccttgccagctacgttggatgacttggaagattatgatttattcggtagcggaggaggtcttgaattggagactgatccatatgacagtctaaacaagggcttctcaagaatgggttttgctgattctaacgttgacaatgttatgcctcaaaacattttccaaaatggagtgggatcgattgctggcgaacatccttatggtgaacatccttcaaggactttgtttgttcggaatattaacagtaacgtagaggattctgaattgcaagctctttttgagcagctatgcgagcattacaaggccaagctgcttaaaaagaggaaacttgacatacatttctcaatccccaaggataatccatcagagaaagatgttaaccaaggaactcttgtggttttcaacttggctccatcagtttccaacagagaccttgaaaatatattcggtgtttatggcgagatcaaggagatacgggaaacaccaaataagaggcatcacaaatttgttgaattttttgacgttagatcagctgatgcagctctcaaagctttgaacaggacagaaattgctggaaaacgtatcaagctggaacatagtcgtcctggtggtgctcgtcgaaacatgatgttgcaaatgaatccggaattggaacaagatgattcctacagctacctgaatcatgtcgagtcgcctttggcaagctctccaataggaaactggcgtaatagtcctattgatcatcctctacaaagtttcagtaagtctccaatatttggaaacttgagtccaacaaagaacatccgttatccagaattttcgatgaagactgcatcggtgaacaatgaccaagaaggaagaaggtttagccacttggatcacctgttttcaagtagcagctataataatgcaagccacaaagcttctacctttcagcaaccgcagtcgtttggatctgtctcttcatttggttctttgaactcacacccgagtcatgtagaaacattatctggatcagaattcctgtggggaagccctagttcttcagcctggcctgtgaatccattctcttcaaacagagaaaatcacaggtttccgtactcagctcagaacggatccctccaccagcttcatcatatcggatctgcgccatctggattcttcccgaggtcccctgaaacttcatcaatgggttcagtggctttccgaggagcaagtggtaatatgaatgctcaaaggaacttgcgtgaaactagctctccaaattttaaaatgttgtctgctccaagacgtagtcaattgtttacaggcaatggctcttacctctggcctgctgctacaatggtttccattgacgacccattggaggatggaagcaaccaacagtttgatagtaacggtaaccaagccgacatcaagatacagtttcagcttgacttgagtaagattatgaggggtgaagatccacggacaaccttgatgataaaaaacatcccaaataagtatacccggaatatgctcttagctgccatcgacgagaaaaacagtggaacttatgattttctttatttgcctattgatttcaagaataaatgtaatgtggggtatgcatttatcaatatggtgtctcctaaattcaccattgcattgtacgaggcctttaatggaaagaaatgggataagttcaacagcgagaaagttgcttcattggcttatgcacgaatccaaggtaaagctgcgcttattgctcactttcagaactcaagtttgatgaatgaagataggagatgccaacctattgtctttgatggatcagaatctaaatatccgatcatccggagaattcgcagctcgagcatcaaattcaacgggttttctcatcctcttgtcggcgagaacacacatcaaagctgacagtcaagtgaatcacgttattgcctctggtttaaaacgtaaatatcagtttctaggatgagatgatgatgaacaacaacaaactactacatagtaccctttagaaacatttctggttttctcagttccttctagtttgctggtatccagaattagaaagaattattgttctagacatgtgaattgatggttgtgttttacttttgtctggttggccaaatgatctctccaaattgtatacataggatagttaagatacaatcttattggtggtaataaataatgtacctttgttcta

SEQ ID NO: 325 - protein, 730 aa, Arabidopsis thaliana
MNIPSGTFSRSDHFHASSDASLFSSSLPLIQHQNINPRDSYHQSVDEMASGLDHFSGGIGNMLDDGDSHPIGNMLPDDEEELFSGLMDDLNLSSLPATLDDLEDYDLFGSGGGLELETDPYDSLNKGFSRMGFADSNVDNVMPQNIFQNGVGSIAGEHPYGEHPSRTLFVRNINSNVEDSELQALFEQLCEHYKAKLLKKRKLDIHFSIPKDNPSEKDVNQGTLVVFNLAPSVSNRDLENIFGVYGEIKEIRETPNKRHHKFVEFFDVRSADAALKALNRTEIAGKRIKLEHSRPGGARRNMMLQMNPELEQDDSYSYLNHVESPLASSPIGNWRNSPIDHPLQSFSKSPIFGNLSPTKNIRYPEFSMKTASVNNDQEGRRFSHLDHLFSSSSYNNASHKASTFQQPQSFGSVSSFGSLNSHPSHVETLSGSEFLWGSPSSSAWPVNPFSSNRENHRFPYSAQNGSLHQLHHIGSAPSGFFPRSPETSSMGSVAFRGASGNMNAQRNLRETSSPNFKMLSAPRRSQLFTGNGSYLWPAATMVSIDDPLEDGSNQQFDSNGNQADIKIQFQLDLSKIMRGEDPRTTLMIKNIPNKYTRNMLLAAIDEKNSGTYDFLYLPIDFKNKCNVGYAFINMVSPKFTIALYEAFNGKKWDKFNSEKVASLAYARIQGKAALIAHFQNSSLMNEDRRCQPIVFDGSESKYPIIRRIRSSSIKFNGFSHPLVGENTHQS

SEQ ID NO: 326 - DNA, 2553 bp, Brassica napus
tttcctccgttattcccttcttctccctcttttttttttttgttgggttggtggtagagattcatctctctcgctcgcttcgtgctttgtatcgtgatcatcgtcggtgttcggtaactgcaccttttagaggtcaaagaaaggtcaaagaagataactttgtgaatggatattccacaagacgtagctggagcttgggggattccctctggaatgggacgccaccgtcatctccccagtgatgctactctcttctctgcttctttacctgttcttccccatggaaaactacaatcaagtgacagcagagatggtttcccattcatagacgacgcggctgcttctcgtcccgtccacgaaagtgttgacgacattgagtctcattccattggaaacatgctccctgacgaagacgatcttctgactgggatgatggacgatctcgacctcaccgagttaccaccagattctgctgatgattacgatcttttcggcagcggaggagggatggagctcgacgctgactttcgtgacggcttgagcatgaatggtggtcctccaaggctatccatttcaagcgcagttccgcagttcaatgttcagaacggcgccggaactgttgctggcgagcatccttatggtgaacatccctcgagaacgttgtttgtcaggaatattaacagcaatgtagaggactctgagctcaagactctctttgagcaatacggtgacataagaacgctctatactacttgcaagcatagagagtttgttatgatatcttattatgacattcgtgctgctcgaatggctatgcggtctttacagaacaagccattaaggcggagaaagttggatattcacttctctattcctaaggataatccatctgagaaggatatgaatcaggggacactagtggtttttaacctggatccttcaataactaacgatgacttgcatggaatatttggtgctcatggcgagatcaaagagataagggaaacaccgcataagaggcatcacaaattcgtcgagttttacgatgttcgagctgctgaagcagcgttaaaggctttaaataggtgcgagattgctggaaaacgtataaaagttgaacctagtcgccctggaggagctcgtagaagcttgatgctgcaacttaaccaagagcttaagaacgatgatttgcattacctgccgctgcttggttcgcctatggcaaactctcccccaagtaactggctgcagatgaacagtcccgttgagggtagtccgcttcagagtgtgctgagcaggtcacccgtttttggagtaagtcctacaaggaacagccacctgtctggtttggcttctgctctaaactcacaaggaccaagctccaagcttgcacccatcggcaggagtccagttgctagcaacgtcttccaacagtcgtctcatttgttccaagagccaaagccggataacaagtacactggaaacctctctccttctggtcctctgatctctaacggaggcggcatcgagacgttgtccggatcagagtttctctgggggagtcccaacacacgctctgagccttcaaactcttcggtttggtcaacgtcatccactggggttccgttctcctcggctcgtgtagaccggtctgttccatttctgcaccaaactcagaaccgcagccatcatcctcatcatcatcatcatctccacgttgggtctgcaccgtcgaatgttcctctagagaaacattttggattcttcccagagtcttcaaaggacactatgttcatgaactcgagtggaatgggtggtggtctcaacggtgtgagtttcccgtcaagaatggcaaatcatgggattatgaatcccgagaacggtttctcaagttacagaatgatgtcttcaccgaggttcagccccatgttcttaagcagcggcttaaaccctggacggttccccgctggggttgatggcttgtatgagaatggaaggccccgtcgagtggagaacagttcgagccaggttgaaagcaggaagcagtttcagcttgatttggagaagattatgaatggagatgattctaggaccaccttgatgattaagaacattccaaacaagtacacatcaaagatgttgctagcggcgattgatgagaagaaccaaggcacttacaacttcctctacttgcccattgatttcaagaacaaatgcaatgttggctatgcattcatcaacatgctttccccggatctcatcattccattttacgaggcgtttaacgggaagaagtgggagaagttcaacagtgagaaagtggcttcattggcgtacgctaggatacaaggaaaaactgcacttatagcccattttcagaactcaagcttgatgaatgaagacatgcgttgccgtccaatcatcttcgacacacctaacagttcagactctgttgaacaggttattggtaaggaaactaagaatgtggatctctttgactttgaggttaatgatgatgacgacgatggtagaaagaagagctgacaaaagaga

SEQ ID NO: 327 - protein, 792 aa, Brassica napus
MDIPQDVAGAWGIPSGMGRHRHLPSDATLFSASLPVLPHGKLQSSDSRDGFPFIDDAAASRPVHESVDDIESHSIGNMLPDEDDLLTGMMDDLDLTELPPDSADDYDLFGSGGGMELDADFRDGLSMNGGPPRLSISSAVPQFNVQNGAGTVAGEHPYGEHPSRTLFVRNINSNVEDSELKTLFEQYGDIRTLYTTCKHREFVMISYYDIRAARMAMRSLQNKPLRRRKLDIHFSIPKDNPSEKDMNQGTLVVFNLDPSITNDDLHGIFGAHGEIKEIRETPHKRHHKFVEFYDVRAAEAALKALNRCEIAGKRIKVEPSRPGGARRSLMLQLNQELKNDDLHYLPLLGSPMANSPPSNWLQMNSPVEGSPLQSVLSRSPVFGVSPTRNSHLSGLASALNSQGPSSKLAPIGRSPVASNVFQQSSHLFQEPKPDNKYTGNLSPSGPLISNGGGIETLSGSEFLWGSPNTRSEPSNSSVWSTSSTGVPFSSARVDRSVPFLHQTQNRSHHPHHHHHLHVGSAPSNVPLEKHFGFFPESSKDTMFMNSSGMGGGLNGVSFPSRMANHGIMNPENGFSSYRMMSSPRFSPMFLSSGLNPGRFPAGVDGLYENGRPRRVENSSSQVESRKQFQLDLEKIMNGDDSRTTLMIKNIPNKYTSKMLLAAIDEKNQGTYNFLYLPIDFKNKCNVGYAFINMLSPDLIIPFYEAFNGKKWEKFNSEKVASLAYARIQGKTALIAHFQNSSLMNEDMRCRPIIFDTPNSSDSVEQVIGKETKNVDLFDFEVNDDDDDGRKKS

SEQ ID NO: 328 - DNA, 3162 bp, Citrus unshiu
gaagcgcatgtccctttgttgaagtctttaaattaacttatctcaattactggttggagctctagggtttgctgatttttcacctcattcgctgaaaggtggcgcgatgaagcagttttttgaccattcttcaggtcctcctaagatcccacagctgaatatacctaaagaagtaggtggtggttcgtgtgggagaatagctggttctgattcgtaccttgcctctgacgatgcttctcttttctctagctcattacctgttcttccacatgaaaagttgaacttaaatgccatgggacttggccgtcagtctgttgataatatctcatcgggcttaagtaaagtccaccatggtgtgtcaagtgatgatccacttgaaggcatcatgaatcctgctattggaaactcacttcctgatgatgaggatgagcttttagctggcataatggatgattttgaccttcgtgggttgccttcttcacttgaggacttggaagactatgatatctttggtagtggagggggcatggaattggaaggcgagcctcaggagagcctgagcatgagtatgtcaaaaataagtatctcagatagtgcatctgggaatgggttgcttcattacagtgttcctaatggtgcgggaactgttgcgggggagcatccatatggtgagcatccttcgagaacattatttgttcggaatattaatagtaatgttgaagattcggagctgagagctctctttgagcaatatggagacatcagaactctgtacactgcatgtaaacatagaggcttcgtgatgatatcatattatgatattcgtgctgctcgaactgctatgcgtgcactacagaacaagccactgcggcggaggaagcttgacattcacttttcaattccgaaggataatccatcagacaaagatttgaatcaaggtactctggtagtttttaatttggatccatcagtttccaatgaggatctccgtcaaatatttggggcctatggcgaggtcaaagagataagggaaactcctcataagcggcaccacaaatttattgaattttatgatgtcagggcagcagaagcagcacttaagtcattaaataggagtgacatagctggaaaacgcataaagcttgaacctagtcgccctggtggagctcgtcgaaacttgatgctacaactgaaccaagagcttgaacaagatgaatctaggattttgcagcatcaagttggttctccaataaccaattctccgcctggtaactgggtgcagttcagcagccctattgaacataatccattgcaaactattagtaaatcccctaatttcaggaacatgagccccactaccagcaatcatatgcctgggttggcttcaattctgcatcctcaggtgtcaaccttggagaaaattgcacctattggcaaggaccaaggaaggggcagtcttatggagcatgcattaaccaatacaatttcagccaatggagcttcctttcaacaatcgaattcattttcagagccaaaaattggcctataccgtggaactgtgtcttcatttggcccctcaccttcaaatggatctggtgtagagacattatcagggcctcaatttctctgggggagtccaagtcgatactcggagcatagcagttctccagcctggcagacgtcgtctatggggcatccattctcatccaatgggaagatccatggtctcccatattcaggccggcaagggtctttccttggctcatcccagcaccatcacattggatctgctccatccggtgttcctttagagaggcgctttggatttctcccagagtcaccagagacctcattcatgaatcctgttgctttctgtggcatgggtataggacagaatgatgggagtttcatggtgaatatgggttctcgtgcttctgttaatcctggcattactgttccaagaaatctttctgataatggttcgagttttcgagtgatgtcttcacccaggcttagtcctgtttttctaggtaatggcccatacccaggactgacacccgccaatagtgagggattatatgagcgtggacggagcaggcggattgagaataataatggaaaccagatagatagcaaaaaacagtttcagcttgagttggaaaagattagaagtggagaagatactagaacaacattgatgattaaaaatatcccaaataaatacacctcaaagatgttgcttgctgcgattgatgaaaatcacaagggtacttatgattttctttacctaccaattgattttaagaataaatgcaatgtgggctatgcatttatcaatatgttgtctcctttgcacataattccattttatgaggcatttaatggaaagaaatgggagaagtttaatagcgagaaagttgcttctctggcatatgctcgaattcagggaagggcagcgcttgtggctcacttccagaattcaagtttgatgaatgaagataagcgctgccgcccaatcctgtttcattcggagggcccagaggctggtgatcaggtcactcaggagcagctcaattccgacagtgtgaatttccaagtttgtccatcaaatgggtcacatctaagggatgcctcaggaagcccaatcgcagatgatgaaggcaataagccagagaatagctgacagttaagtgaatggagatgccgtgtgcccagacttatggggatacaagtgctcacttaagcgtatatatgcaagtgtaaaaatttaggaacaggtgaaacttttggtgaagcagcatgcagattttgtacggtgcttagtaagaagtcttttgaagcagaagcattatcattttggattatggtggtttctcatgggagggggaagaataattgggatttgtgcatgatttttcctttcctcaccattttggcattttgattttgattttaattttttcccccttttcttggtattcatcaggttggataattttactcagggatagtcggtgggtaaatgttttctggggtttaggtttttcagggttggggaagtgaggtgggtaacaatcatagaaattgtatagtggaaacgaccaacaaacaactttttattttgttaatattatattagtatttataaattgtgacttagtt

SEQ ID NO: 329 - protein, 858 aa, Citrus unshiu
MKQFFDHSSGPPKIPQLNIPKEVGGGSCGRIAGSDSYLASDDASLFSSSLPVLPHEKLNLNAMGLGRQSVDNISSGLSKVHHGVSSDDPLEGIMNPAIGNSLPDDEDELLAGIMDDFDLRGLPSSLEDLEDYDIFGSGGGMELEGEPQESLSMSMSKISISDSASGNGLLHYSVPNGAGTVAGEHPYGEHPSRTLFVRNINSNVEDSELRALFEQYGDIRTLYTACKHRGFVMISYYDIRAARTAMRALQNKPLRRRKLDIHFSIPKDNPSDKDLNQGTLVVFNLDPSVSNEDLRQIFGAYGEVKEIRETPHKRHHKFIEFYDVRAAEAALKSLNRSDIAGKRIKLEPSRPGGARRNLMLQLNQELEQDESRILQHQVGSPITNSPPGNWVQFSSPIEHNPLQTISKSPNFRNMSPTTSNHMPGLASILHPQVSTLEKIAPIGKDQGRGSLMEHALTNTISANGASFQQSNSFSEPKIGLYRGTVSSFGPSPSNGSGVETLSGPQFLWGSPSRYSEHSSSPAWQTSSMGHPFSSNGKIHGLPYSGRQGSFLGSSQHHHIGSAPSGVPLERRFGFLPESPETSFMNPVAFCGMGIGQNDGSFMVNMGSRASVNPGITVPRNLSDNGSSFRVMSSPRLSPVFLGNGPYPGLTPANSEGLYERGRSRRIENNNGNQIDSKKQFQLELEKIRSGEDTRTTLMIKNIPNKYTSKMLLAAIDENHKGTYDFLYLPIDFKNKCNVGYAFINMLSPLHIIPFYEAFNGKKWEKFNSEKVASLAYARIQGRAALVAHFQNSSLMNEDKRCRPILFHSEGPEAGDQVTQEQLNSDSVNFQVCPSNGSHLRDASGSPIADDEGNKPENS

SEQ ID NO: 330 - DNA, 2253 bp, Glycine max
atgcttcccgatgatgaagaggaccttttggctgggattatggatgattttgacctcagtaaattgcccagtcaactggaggatttggatgaaaatgatctgtttgtcaatggagggggatttgagatggattttgaaccccaagagagcctcaatatcggtgtgtccaagataagcatatcagatggagttgcttcaaatggtattggtcagtatgcaatcccaaatggtgtgggaacagtggctggggagcatccctatggcgagcatccatcaaggacattatttgttcgaaacatcaatagtaatgtcgaggactctgaattacgaacactatttgagctatatggggacattagaactttatacacagcatgcaagcataggggctttgtgatgatatcttactatgatattcgagctgctcgcactgccatgcgtgctttacaaaacaagcccttgagacgaagaaaacttgatattcatttttcaattcctaaggataacccctcggaaaaagatattaatcaaggaacccttgtagtgttcaatttagatccatcagtatccaatgatgaccttcgtcaaatatttggggcttatggtgaggtcaaagagatcagggaaacaccacacaagagacaccataaatttattgaattttatgacgttagagcagcagaggcagctcttaaagcattaaatcgaagtgatattgctgggaaacgcataaaacttgaacccagtcgccctggtggagctcgtagaaacttgatgcaacaactgagccaagaactggaacaagatgaagctcgaacttttagacatcaagtagattcacctgtggccagttctcctcccggtagctgggcacaatttggtagtccagttgaacaaaatccattatcttcttttagcaagtcccctggtttgggccatgccggtcccattaataccaaccatttgtctggattggctgcaattctttccccacatgcaacaacctctcccaagattgcaccgattggcaaggaccctggaagggctgcaaatcagatgtttgcaaactctggattaacacaaggagcaacctttcagcattctatatcctttcctgagcaaaatgtaaaggcaagtcctaggtctatatctacttttggtgaatcaagttcaagtgcatcaagtattggaacactgtccggccctcaatttctttggggaagcccaactccttactccgagcattcaaacacttctgcctggtcttcatcttctgtggggcttccatttacatctagtgtccaaaggcaaggtttcccatattctactaatcgcagtccttttcttggctctcactctcatcatcatgttggatctgctccatctggccttccacttgataggcattttagctacttccctgagtcacctgaagtttctctcatgagcccagttgcatttgggaatttaaatcacgttgatgggaattttatgatgaacataagtgctcgtgcatctgtaggagccagtgttggtctttctggaaatacccctgaaattagttcacccaatttcagaatgatgtctctgcctaggcatggttccttgttccatggaaatagtttgtattctggacctggagcaactaacattgagggattagctgaacgtggacgaagtagacgacctgacaatggtgggaaccaaattgatagtaagaagctgtaccagcttgatcttgacaaaatcttcagtggtgaagatacaaggactactttaatgattaaaaacattcctaacaagtatacatcgaagatgctgcttgctgcaattgatgagaatcaccagggtacttatgacttcctctacttgccaattgactttaagaataagtgtaatgtgggttatgcttttatcaatatggtgtctccttcacacatcattgccttctacaaggcctttaatgggaaaaagtgggagaagttcaacagtgaaaaggttgcttcactggcatatgcacggatacaaggaaaggctgcgcttgtgatgcatttccagaattcaagcttaatgaatgaggacaaacggtgccggccaattctctttcattcagagggccaagatactggcgaccaggaaccttttctatccagcaatttgaatatatgcattcgccaaccagatggatcctattcaagtgatttgttggagagcccgaagggcaatttggatcagaagttagagaacgattaa

SEQ ID NO: 331 - protein, 750 aa, Glycine max
MLPDDEEDLLAGIMDDFDLSKLPSQLEDLDENDLFVNGGGFEMDFEPQESLNIGVSKISISDGVASNGIGQYAIPNGVGTVAGEHPYGEHPSRTLFVRNINSNVEDSELRTLFELYGDIRTLYTACKHRGFVMISYYDIRAARTAMRALQNKPLRRRKLDIHFSIPKDNPSEKDINQGTLVVFNLDPSVSNDDLRQIFGAYGEVKEIRETPHKRHHKFIEFYDVRAAEAALKALNRSDIAGKRIKLEPSRPGGARRNLMQQLSQELEQDEARTFRHQVDSPVASSPPGSWAQFGSPVEQNPLSSFSKSPGLGHAGPINTNHLSGLAAILSPHATTSPKIAPIGKDPGRAANQMFANSGLTQGATFQHSISFPEQNVKASPRSISTFGESSSSASSIGTLSGPQFLWGSPTPYSEHSNTSAWSSSSVGLPFTSSVQRQGFPYSTNRSPFLGSHSHHHVGSAPSGLPLDRHFSYFPESPEVSLMSPVAFGNLNHVDGNFMMNISARASVGASVGLSGNTPEISSPNFRMMSLPRHGSLFHGNSLYSGPGATNIEGLAERGRSRRPDNGGNQIDSKKLYQLDLDKIFSGEDTRTTLMIKNIPNKYTSKMLLAAIDENHQGTYDFLYLPIDFKNKCNVGYAFINMVSPSHIIAFYKAFNGKKWEKFNSEKVASLAYARIQGKAALVMHFQNSSLMNEDKRCRPILFHSEGQDTGDQEPFLSSNLNICIRQPDGSYSSDLLESPKGNLDQKLEND

SEQ ID NO: 332 - DNA, 2598 bp, Medicago truncatula
atgaagcagtctttcgatccttcatttatcgctccttccaagattccacctataaatacagctggaaaattgaggcatggtgctttggaagtttcatctggatctgattcataccacgcttcatctgatgccagtctcttttctagctcattacctgttcttccacatgaaaagttgaacttaaatgaaactgaaaatggttttcaatctgttgatgacatctcaactaactttaaaaaacatcatcaagaggcagagcttaatggttcccttgacaatggtaataatcacgcaatcggaaccatgcttcctgatgatgacgaagagcttttggctggcataatggatgattttgacttacgcggtttgcctggttcccttgaggacttagaagagtatgatctttttgatagtagtggaggcttggaactagaaacggatccacaggaaagcctcagtgtgggtatatctaagttaagcctttctgatagctctgttggaaatagtatgcccccttattctttacctaatggtgtgggaggcggagctgttgctggggaacatccatatggagagcatccttctcgaacattgtttgttcgaaatattaacagtaatgtggaggatacagagctgcggactctttttgagcaatatggtgatattagaaccctatatactgcatgtaaacacagggggtttgtaatgatatcatattatgacatccgtgctgctcggacagctatgcgtgcattacaaaataaacctttgcggcgaaggaaacttgacattcacttttcaataccaaaggataatccatcagacaaagatatcaatcaaggaaccttggtagttttcaatttggatccatcagtttcaaatgaagacctccgccaaatatttggggcttatggagaggtcaaagagataagggaaactcctcacaagaggcatcataagtttattgaatactatgatgtaagagctgcagaagcagcacttaaatcattaaataggagtgacatagctggtaaacgcataaagcttgaaccaagtcggcctggaggagctcgtcgcaatttgatgctccaactgaatcaagagcttgaccaagatgagtctcgaagttttcgatatcaagtgggttcacctctagccggctctccgccaggtaattggttacagttcaacagtcctattgagcagagttcattgccaaatttaaatcattctcctggttccaaaattatgagcccaacaaccagcaaccatttaccgggattagcttcaattttgcaaccacagttgtcgaacacagtgaaggccgcaactattggccaggacataggaaggagtagtcatggagaccacatatttcccaataagatttcatccgctggatctaatttcaactcacattcacttccagagccaaaatttagtccatatcgtggagctttgtcctcgtttggtgcatcaacatcaaatgggtcgtcagtggaaaccttgaccgctccacagtttctatggggaagtccaaacttatcctcagagccaaccaagccttcagcttggccaaggccatctgtgggacatcaacttagtacatcgaatggaacgagtcatgctttcccatactcaagtcagaacaattcctttgtcagttcgtctcagcagcaacatcatcatcatcatgtcggttctgctccttcaggtttgccttttgaaaggcacttcggttttttccccaagtcatctgaaacttcattgatgaataatgttggctatagaggcatgggtctagggcacaatgatggaaattacatgcttaatagtggcatttctggtaatgttggcatttctattccaagaaatatgcctgacaatggttcatcaaacttccgaatgagatcttctcctatacttagccctgtatttttaggtaatggtccttatccaggactactacctactgctatggagagttttactgaccgtgttaggagtagatggatcgacaacaatggaagccaagttgacaacaagaagctatttcagctcgacttagataagattagaagtggtgaagatacaaggactacgctgatgataaagaatatcccaaataaatacacatcaaaaatgttgttagctgccattgatgaaaatcacaagggcacctatgattttctctatctgccaattgactttaagaataaatgcaacgtcggttatgcatttatcaacatgttgtcaccatcgcttatcattccattctacgagacattccatgggaagaagtgggagaagtttaatagtgaaaaagttgcttctttggcgtatgctcgaatccaagggaagaatgccctcgtaaaccatttccaaaattcaagtttgatgaatgaagataaacgctgccgacctattgtcttccactcagatggttctgaagttgctgatcagatcgtacaagagcatctcccctccaactccaacaatatgtatattcaggcagttaagtcaagtgagttacaattaagcgattccttcggatactttccaaaggatggtcctcctatgagtttgaatgcaaattaa

SEQ ID NO: 333 - protein, 865 aa, Medicago truncatula
MKQSFDPSFIAPSKIPPINTAGKLRHGALEVSSGSDSYHASSDASLFSSSLPVLPHEKLNLNETENGFQSVDDISTNFKKHHQEAELNGSLDNGNNHAIGTMLPDDDEELLAGIMDDFDLRGLPGSLEDLEEYDLFDSSGGLELETDPQESLSVGISKLSLSDSSVGNSMPPYSLPNGVGGGAVAGEHPYGEHPSRTLFVRNINSNVEDTELRTLFEQYGDIRTLYTACKHRGFVMISYYDIRAARTAMRALQNKPLRRRKLDIHFSIPKDNPSDKDINQGTLVVFNLDPSVSNEDLRQIFGAYGEVKEIRETPHKRHHKFIEYYDVRAAEAALKSLNRSDIAGKRIKLEPSRPGGARRNLMLQLNQELDQDESRSFRYQVGSPLAGSPPGNWLQFNSPIEQSSLPNLNHSPGSKIMSPTTSNHLPGLASILQPQLSNTVKAATIGQDIGRSSHGDHIFPNKISSAGSNFNSHSLPEPKFSPYRGALSSFGASTSNGSSVETLTAPQFLWGSPNLSSEPTKPSAWPRPSVGHQLSTSNGTSHAFPYSSQNNSFVSSSQQQHHHHHVGSAPSGLPFERHFGFFPKSSETSLMNNVGYRGMGLGHNDGNYMLNSGISGNVGISIPRNMPDNGSSNFRMRSSPILSPVFLGNGPYPGLLPTAMESFTDRVRSRWIDNNGSQVDNKKLFQLDLDKIRSGEDTRTTLMIKNIPNKYTSKMLLAAIDENHKGTYDFLYLPIDFKNKCNVGYAFINMLSPSLIIPFYETFHGKKWEKFNSEKVASLAYARIQGKNALVNHFQNSSLMNEDKRCRPIVFHSDGSEVADQIVQEHLPSNSNNMYIQAVKSSELQLSDSFGYFPKDGPPMSLNAN

SEQ ID NO: 334 - DNA, 2436 bp, Oryza sativa
atggagcagcgtgaggatcataccaaatcatcagaacctgcattcattccatccaaaaggactcatcagatgagaaacatatgggcatggggaggtccttcttcaactacagtcaacggatcaagtgacgcggtcttgttctccagctcgttgccatcagttctgcaatttggaaaactgccaggtaaagaaagggagtacaatgctcaaccaaaggatgatatgtttcccatgatgaagcagccaggcactaatgctagagtggctgaccccatggatgatgtagcacagcatttgattggaaatctgttaccagatgatgaagagctattggctggggtaattgaagattttgatcatgttaaactgagaacccaagttgaggaatcagaagaatatgatgttttccgcaatagtgggggtatggagctggatattgaccctctggaaagcatcacctttggtacagcaaaggctagccttgtcaatggtactggaagtagcactaatcagtacagcatccaaaatggtgctggaacagttactggtgagcatccttatggtgagcacccgtccaggacattgttcgttcggaacattaatagtaatgttgaagactcagaactgcgctcattgtttgagccatttggggatattcggtccatgtacactgcaacgaaacacagaggattcgttatgatatcttactacgatatccgtcatgcaagaaatgcaaagactgcattgcaaagtaaaccattaaggaggaggaaacttgacattcactattcaattcccaaggagaatccgtcagataaagatatgaaccaaggaaccctggtgatctttaatctggaaccagctgtttcaaatgaggaactccttcaaatttttggtgcatttggtgaagttagggagataagagagacaccacataagcgacaccatagatttattgagttctatgatgttagggctgcagaatctgccctccgttcattaaacaagagtgacattgctggaaaacgggtaaagttggaacctagccgtcctggtggagctcgccgaagttttatacagcattttaatcacgaatttgagcaagacgaaacaaagcataattcatttcagattggttcaccttctgccaactctccaccaagtttgtggtcccaacttggcagcccaacagatgaaaataaattaaatgcactcaatgaaactgcatttaatgggggaatgagccctttgggcagtaaccatctttctgggttctcttcaggatatcctcccatgaaatcacccgttgggaagagctcctattggaataaccgtgctgacaacatattccatgggtcaccaactttgcacaattcacattcgtttccagaacatcatggtggaattataagtgccagcccgcttgtgtcatccgcagcttcgtcagcctctactgcatctggttttactgcactgactggaacatcatttctctggggtaataacaataacttaagggatcatggccagccttcatctatccaatctcaagctcttagcaactcactttttcccaataaccagccacaacgccagagtaatctgtatcagaatctgcgtggttcctttggggcatccgagcacttctcccagtttaatgttgggtctgccccatctgttttcccttttgagagtaatttcggctatttctctgattccccagacacatcttacatgagacagggaaagtttggcggcacaggccccacacgtgttagtggaagcctcatgacgaactttggtgcctatccccgcattaatgttgcttccatgcaaaacggttcagttggttttgaaggtctgcttgaccgtggccgaaatcagacagttggaaactctgggtgtcaggaagatagcagagtgcaatatcaattagatttggagaagatcattgctggtaaagacaccagaacaacgttgatgataaagaacataccaaacaagtatacatcaaatatgcttttggaagtaattgatgaaactcatgaagggacttatgatttcttctacttgcctattgatttcaagaataaatgcaatgttggctatgccttcattaatatggcatctcctggttatattgtatctttctttaaggcatttgctggtcggaaatgggaaaaatttaacagtgagaaagtagtctcgttggcatatgctcgaatacaggggaaagccgcacttgtaaatcatttccagaattcaagcttgatgaatgaagacaagcgctgccgccctatgctatttgatcccaagcatactgaaaacaacaatcagatcctgttgaacggaatatttatctccatggcccagcaagatgccacacaagaaaggcatgacctccctgaaaacccaagggaagataatttcagttaa

SEQ ID NO: 335 - protein, 811 aa, Oryza sativa
MEQREDHTKSSEPAFIPSKRTHQMRNIWAWGGPSSTTVNGSSDAVLFSSSLPSVLQFGKLPGKEREYNAQPKDDMFPMMKQPGTNARVADPMDDVAQHLIGNLLPDDEELLAGVIEDFDHVKLRTQVEESEEYDVFRNSGGMELDIDPLESITFGTAKASLVNGTGSSTNQYSIQNGAGTVTGEHPYGEHPSRTLFVRNINSNVEDSELRSLFEPFGDIRSMYTATKHRGFVMISYYDIRHARNAKTALQSKPLRRRKLDIHYSIPKENPSDKDMNQGTLVIFNLEPAVSNEELLQIFGAFGEVREIRETPHKRHHRFIEFYDVRAAESALRSLNKSDIAGKRVKLEPSRPGGARRSFIQHFNHEFEQDETKHNSFQIGSPSANSPPSLWSQLGSPTDENKLNALNETAFNGGMSPLGSNHLSGFSSGYPPMKSPVGKSSYWNNRADNIFHGSPTLHNSHSFPEHHGGIISASPLVSSAASSASTASGFTALTGTSFLWGNNNNLRDHGQPSSIQSQALSNSLFPNNQPQRQSNLYQNLRGSFGASEHFSQFNVGSAPSVFPFESNFGYFSDSPDTSYMRQGKFGGTGPTRVSGSLMTNFGAYPRINVASMQNGSVGFEGLLDRGRNQTVGNSGCQEDSRVQYQLDLEKIIAGKDTRTTLMIKNIPNKYTSNMLLEVIDETHEGTYDFFYLPIDFKNKCNVGYAFINMASPGYIVSFFKAFAGRKWEKFNSEKVVSLAYARIQGKAALVNHFQNSSLMNEDKRCRPMLFDPKHTENNNQILLNGIFISMAQQDATQERHDLPENPREDNFS

SEQ ID NO: 336 - DNA, 2547 bp, Oryza sativa
atggaccgaccacaagatcctttcaactcacgagggattgcagttccccctgcagtcaagatgaggaacatggctggaaacaacagtccatggatagaccctctgccaccaccgatgaatgcgcgcaatgggctggcaaatgccagcctcttctccacctctttgccagtccttcctcatgaaaaaatcaactttcttgattctgcacgtggcaccccattgatggatgatgcttctgcaaaactaaaagagctcgatgatgaccctgaagggaaggactacaagtttgactttgatctccgccaaatcgatgatttattgcctaatgaagatgatcttttcgcgggtatcacaaatgagattgagcctgctgggcagacaaattctatggaagaactggaggaatttgatgtatttggcagtggagggggcatggagctggacacagaccctgtggagagcatcacagctggtttggggaatacaagtatagctgatgggcttagaggcaatggggtcaaccattttggtccgtcaaatagtgccagcactgtggccggggagcatccatacggggagcacccttctagaacattgtttgtgaggaacatcaatagcaatgttgacgacacagaattgcgctcactttttgagcaatatggggatatccgaacactttatactgcaacgaaacatagaggttttgtgatgatatcttattttgatatccgagctgcacgtggtgcgatgcgtggattgcagaacaagcctctgaggaggagaaagttggacattcatttctccatcccgaaggagaatccatcagataaagatttaaaccagggaactctggttatttttaacttggatccctcagtttccaatgaagaagttcgccagatttttggaacatatggggaagtaaaggagataagagagacaccaaataaaaagcatcataagtttattgagttctatgatgtaagagcagcagaagctgctcttcggtcactgaataaaagcgagatagctggaaaacgcataaagttggaaccaagtcgtcctggtggaacgcgcagaaacttgatgcagcagcttggtcatgatatagaccaggatgaacccagaagctacaggattcctcatgttggttcacctattgccagctctcctccaggggcatgggctcaatacagtagtccaactgataacaatttgttgcaagcattcaatgcgtcaccaactggaaatggcatgagtcctattgggatgcctccttccttgatatcgaatgctgtgaagattgctccaatcgggaaggatagcaactggtctaaatatgacaaagtattctcaaacaacaaccagccccacggtgctgcatttcagcattcccattcataccaagatcacaaaagtgaacatatgagttcaagtcctgggactttaacagggcctgagtttctatggggtagtccaaagccttattctgaacatgctcaatcccctatttggcgtccaccagcaattggtcatgcaataccatctaatacccgttctcaggggcagggattattgtatggtggccgtcaggcttcactttttgggtctcaagatcagcttcatcatcatcatgttggctctgccccttcaggtgctccatttgagagccactttggatttttacctgaatcaccagagacgtcttatatgaatcaagtcaggtttgggaacattgggaatattggtagtggccgaaacggaactggcctcatgctgaacatggctgctcgtgcttctgtaaaccctgtttctgctttgagtggaaacatgtcagacaataactctagtagctttagaccaatactatcacctagattgggacaatcattttacgggaatcccacatatcaagggcctggttcttttggacttgacaattccatcgaacgtggtcgtaaccgccgagttgacagcagtgtgtttcaagctgatagcaagaagcaataccagcttgatttggagaagatccgtaaaggcgatgatactcgaactacattgatgattaaaaatattccgaacaagtacacttctaagatgctgctggctgcaattgatgagtttcataaaggaacctatgactttttctacctgccaattgatttcaagaacaaatgcaatgttggctacgcgttcattaacatgatatcacctgtgcacattgtatcgttctaccaggcgttcaatggcaagaaatgggaaaaattcaacagtgagaaagtagcctccttggcctacgctaggatccagggaaggactgcactcatttcacatttccagaattcaagtttaatgaacgaggataagagatgccgccccattctttttcattctaatgggccagatgctggaaatcaggaaccatttcccatcaacggcatatgtatccatatgccactggaagatggagcaattgcaacaggggatccctttggaaatgaagaggacaacaatcagaacgagaggacagcaggagaagagttatga

SEQ ID NO: 337 - protein, 848 aa, Oryza sativa
MDRPQDPFNSRGIAVPPAVKMRNMAGNNSPWIDPLPPPMNARNGLANASLFSTSLPVLPHEKINFLDSARGTPLMDDASAKLKELDDDPEGKDYKFDFDLRQIDDLLPNEDDLFAGITNEIEPAGQTNSMEELEEFDVFGSGGGMELDTDPVESITAGLGNTSIADGLRGNGVNHFGPSNSASTVAGEHPYGEHPSRTLFVRNINSNVDDTELRSLFEQYGDIRTLYTATKHRGFVMISYFDIRAARGAMRGLQNKPLRRRKLDIHFSIPKENPSDKDLNQGTLVIFNLDPSVSNEEVRQIFGTYGEVKEIRETPNKKHHKFIEFYDVRAAEAALRSLNKSEIAGKRIKLEPSRPGGTRRNLMQQLGHDIDQDEPRSYRIPHVGSPIASSPPGAWAQYSSPTDNNLLQAFNASPTGNGMSPIGMPPSLISNAVKIAPIGKDSNWSKYDKVFSNNNQPHGAAFQHSHSYQDHKSEHMSSSPGTLTGPEFLWGSPKPYSEHAQSPIWRPPAIGHAIPSNTRSQGQGLLYGGRQASLFGSQDQLHHHHVGSAPSGAPFESHFGFLPESPETSYMNQVRFGNIGNIGSGRNGTGLMLNMAARASVNPVSALSGNMSDNNSSSFRPILSPRLGQSFYGNPTYQGPGSFGLDNSIERGRNRRVDSSVFQADSKKQYQLDLEKIRKGDDTRTTLMIKNIPNKYTSKMLLAAIDEFHKGTYDFFYLPIDFKNKCNVGYAFINMISPVHIVSFYQAFNGKKWEKFNSEKVASLAYARIQGRTALISHFQNSSLMNEDKRCRPILFHSNGPDAGNQEPFPINGICIHMPLEDGAIATGDPFGNEEDNNQNERTAGEEL

SEQ ID NO: 338 - DNA, 1719 bp, Physcomitrella patens
atgagcaaccatcggttaggagacgggtcagcggcggggctacagtccggggctgcaggatccgttgctggagagcatccatacggggagcatccgtcacggacgctgtttgtgcggaacataaattcgaacgtggaggacacggagttgagacagctgttcgagcaatacggagccatccgcacgttgtacactgcttgcaagcatcgagggtttgtgatgatctcgtattatgacattcgagcagcacggagcgcgatgcgagcgctgcagaacaaaccgctgaggcggcgcaagctggatattcacttttcgatcccgaaggataatccatcggacaaggacgtgaaccaggggacgctggtggtgttcaatttggacgcatcggtgtcgaacgacgagctacggctaatatttggagtttacggcgaagtgaaagagattcgggagacgccgcacaagcggcatcacaagttcatcgagttctatgatgttcggtcggcagaggcggcattgcgggctctgaatagaagcgatatagccggcaagcgcatcaagcttgagccaagtcgaccaggtggagcgcgacggagcttgctgcaacagctgaatcaggaagccggggacgaagacccccgggcgaggcaacaacctcattcgccgctgaatacgtcacctccggtgcggcctggtagcggcggattgatgtttcccagctcgaatgggaacggttccctgtccgggcagcagttcagtctgtggggtactccgagttcctcgttttcgcacatgtctcagagtccgcctccagctctgtggtcgaactcgtcgtcggtggggcagtcgttttacggaatggggcaggcacagctgcaagcacacgcgttcaacagcagcttattgtcgggtctttcacgtcaccacgtgggttcagcgccatcaggggagccgtcgcttttggagaggcgtcacagctacataggaggggagtcattgggggagtcgagctcgctgttgaggtcgtcatcggggacaggattgggagggaatgcagcccatgcgataaacatcggggtgagtcaccagcatgggatgatgaactcgagcagttctctgggaggcagttcggggatggagcacgcatcgtcgccaaacgtggggatgatgtctcctcaggctcggacacgttttctgcagaacggaggtccgctggggccgagttcaatagagggtgcgtcggacaggggtcggagtcggaggggcgagagcgttgctgcgcaagcggacaacaagaagcagtaccaactggacctggagcggatattgcgcggggatgatccgaggaccactctgatgatcaagaacatcccgaacaagtacacatcgaagatgctgttggccgcaatcgatgagcatcatcggggcacgtacgacttcatctatcttccaatcgacttcaagaacaagtgcaatgttgggtatgcgttcatcaacatgatgtcgccgtcgcgcatagttccgttttacaaggcgttcaacgggaagaagtgggagaagttcaactcggagaaggtggcttcactggcgtacgcccgaatccagggcaaagctgctctggtggctcacttccagaactcgagcctgatgaacgaggacaagcggtgtcgtccaatcctatttcattcggacggggctcatatgggagaccagttagagtaa

SEQ ID NO: 339 - protein, 572 aa, Physcomitrella patens
MSNHRLGDGSAAGLQSGAAGSVAGEHPYGEHPSRTLFVRNINSNVEDTELRQLFEQYGAIRTLYTACKHRGFVMISYYDIRAARSAMRALQNKPLRRRKLDIHFSIPKDNPSDKDVNQGTLVVFNLDASVSNDELRLIFGVYGEVKEIRETPHKRHHKFIEFYDVRSAEAALRALNRSDIAGKRIKLEPSRPGGARRSLLQQLNQEAGDEDPRARQQPHSPLNTSPPVRPGSGGLMFPSSNGNGSLSGQQFSLWGTPSSSFSHMSQSPPPALWSNSSSVGQSFYGMGQAQLQAHAFNSSLLSGLSRHHVGSAPSGEPSLLERRHSYIGGESLGESSSLLRSSSGTGLGGNAAHAINIGVSHQHGMMNSSSSLGGSSGMEHASSPNVGMMSPQARTRFLQNGGPLGPSSIEGASDRGRSRRGESVAAQADNKKQYQLDLERILRGDDPRTTLMIKNIPNKYTSKMLLAAIDEHHRGTYDFIYLPIDFKNKCNVGYAFINMMSPSRIVPFYKAFNGKKWEKFNSEKVASLAYARIQGKAALVAHFQNSSLMNEDKRCRPILFHSDGAHMGDQLE

SEQ ID NO: 340 - DNA, 2597 bp, Populus trichocarpa
ctgttttctgttttagtgaggagtgatcaaatggagcaagatttgaagggcacaatgtctggtccatcaaaaattccagttgttaatagtattaagaaagtgggcactggagcatgggggatcccacttagaactgatgcaagattgttttctagctcattgcctgtccttccacatgaaaagctgaactttcatgaatcagagaattgtggtcgatctattgatgatagctcacctaacttgaataaactcgaccttgaaactgaggtcacagatctatttgaagacattgaaccaagtgcaattggaaatttgcttcctgatgacgacgaacttctttctggcataatggatgattttgatcttagtgggttgcctagtcaagtggaggatttggaagaatgtgatttctttggtcctggaggggggatggagttggattttgaatcccaagaaagccttcgtattggtatgtccaagctaaacatgtctgatgggattcctgcaaatggggttggtcattatcctcttccaaatggtgtgggaacagttgctggggaacatccatatggggagcatccttcaagaacattatttgttcggaatatcaatagtaatgtggaggactctgaattgagatctctcttcgagcaatttggggatatcagaacattatacactgcatgcaagcatagaggctttgtgatgatatcttactatgatattcgagatgctcggactgcaatgcgtgcgctacaaaataagcccttaaggcggagaaaactggacattcatttttcaattcccaaggataacccgtctgaaaaggatataaatcaagggactcttgtagtcttcaatttggatgcatctgtatcaaatgatgatcttcgcctaatatttggggcttatggtgaggtcaaagagataagagaaacaccacacaagcggcaccataaattcattgaattttatgatgttagagctgcagaggcagctctgagagcattaaataagagtgacattgctggaaagcgcattaagcttgaacctagccgccccggtggagcccgtagaaacatgatgcagcaaataagtcaagagctggaacaagatgaagttcgaagttttcgacatcaagtaggctcaccagtggggaactctcctccaggtgcctggcttggcagcccagttgaacacaatccattgcatggttttagcaagtccccaggtcttggaactttaagtcctgtaaatggaaataatttgcctggcttggcttcaattctcccccctcatgtctctaaccctgcaaagattgccccaattggcaaggaccatggaagggctaaccatgcaaaccagatggttaccaactctggatcaatgcaaggagcaccctatcaacattcttgttcattcaccgaccaaaaattgagcaccagtcctgttccaacatcaaatgcatctggtataggcacattgactggtcctcagtttctctggggaagttctgctgcatggccgacatcatctgttggaaatgcatttccatcacgtgggcaaggacagggttttccatacaccagtaggcatggatctcttcttggttcacatcaccatcacgttggatctgctccatctggtcttcctcttgataggcattttggcttcttcccggaatcaccagaaacatctttcatgaaccaagttgcactggggggcatgggtttaaatcgcaacactggaaattatatgatgaacatgggtggccgtgcagctgtgggtgctggcatcggacttccaggtcccctgactgaaaatggttcacctagttaccgggtgatgtcattgcctaggcacaatcctatgtttatgggggctggttcttattcaggaccagtgacaatcggcaatgagggatttgttgaacgtgttcgaagtcggcgggtagagaataatgggagccagatagattgcaagaagcagtatcagcttgatttggaaaaaatcattagcggggaagatactaggacaactttaatgattaaaaacatccctaacaagtacacttcaaagatgctgctggctgctattgatgagattcaccgcggtacttatgactttctctatcttcccattgattttaagaataaatgcaatgtgggttatgccttcatcaatatggtgtctccctcacacatcatttccttctatgaggcatttaatgggaagaggtgggagaagtttaatagtgaaaaagttgcttcactggcatatgctcgaattcagggcaagggtgccctcgtgacacactttcagaattcaagcttaatgaatgaagataagcgatgccgcccaattctcttccactccgagggccaagaggctgctgatcaggaacctttcctatctggtaatttaaacatttgtatccgtcagcctgatggatcttatttcggggattcgttcgacagcccagaggacagtctggatgagaaagcggagaagaattaacagcctaaacttgctcttggccttgaatggtggtcaggagtgctaaccattgtgtaggcattttgaatgtataaatttgg

SEQ ID NO: 341 - protein, 828 aa, Populus trichocarpa
MEQDLKGTMSGPSKIPVVNSIKKVGTGAWGIPLRTDARLFSSSLPVLPHEKLNFHESENCGRSIDDSSPNLNKLDLETEVTDLFEDIEPSAIGNLLPDDDELLSGIMDDFDLSGLPSQVEDLEECDFFGPGGGMELDFESQESLRIGMSKLNMSDGIPANGVGHYPLPNGVGTVAGEHPYGEHPSRTLFVRNINSNVEDSELRSLFEQFGDIRTLYTACKHRGFVMISYYDIRDARTAMRALQNKPLRRRKLDIHFSIPKDNPSEKDINQGTLVVFNLDASVSNDDLRLIFGAYGEVKEIRETPHKRHHKFIEFYDVRAAEAALRALNKSDIAGKRIKLEPSRPGGARRNMMQQISQELEQDEVRSFRHQVGSPVGNSPPGAWLGSPVEHNPLHGFSKSPGLGTLSPVNGNNLPGLASILPPHVSNPAKIAPIGKDHGRANHANQMVTNSGSMQGAPYQHSCSFTDQKLSTSPVPTSNASGIGTLTGPQFLWGSSAAWPTSSVGNAFPSRGQGQGFPYTSRHGSLLGSHHHHVGSAPSGLPLDRHFGFFPESPETSFMNQVALGGMGLNRNTGNYMMNMGGRAAVGAGIGLPGPLTENGSPSYRVMSLPRHNPMFMGAGSYSGPVTIGNEGFVERVRSRRVENNGSQIDCKKQYQLDLEKIISGEDTRTTLMIKNIPNKYTSKMLLAAIDEIHRGTYDFLYLPIDFKNKCNVGYAFINMVSPSHIISFYEAFNGKRWEKFNSEKVASLAYARIQGKGALVTHFQNSSLMNEDKRCRPILFHSEGQEAADQEPFLSGNLNICIRQPDGSYFGDSFDSPEDSLDEKAEKN

SEQ ID NO: 342 - DNA, 2717 bp, Populus trichocarpa
aattgctgtgttagtgagaagagaataaaaatggagcaaaactcaaaggacgcagtacctggtccatcaaaaattccagctgttaatagtagtaagaaggtggtcactggtgcatggggcatcccacttagaattgatgcatttcagtcatcgagtgatgcaagcttgttttcgagttcattgcctgtcctttcacatgaaaagctgaactttaatgattcagagaattatggtcgatctattgatgatagcccacctagcttgaataatctcgacctagaaactgaggttactgatctattcgaagacatcgaaccaagtgcaattggaaatttgcttcctgatgatgatgagcttcttgctggcataatggatgatttcgaccttagtgggttgcctagtcaactggaggatttggaagaaattgatctctttggtcctggaggggggatggagctagattttgaatcccaagaaagccttcgtattggtatgtccaagctaaacatgactgatgggattcctgcaaatggggttggtcattatgctcttccaaatggtgtgggaacagtggctggggaacatccatatggggagcatccttcaagaacattatttgttcggaatatcaatagtaacgtggaggactctgaattgagatctctctttgagcaatatggggatatcagaacattatacactgcttgcaagcatagaggctttgtgatgatatcttactatgatattagagatgctcggactgcaatgcgtgctctgcaaaataagcccttaaggcggagaaaactggacattcatttttcaattcccaaggataacccttcagaaaaagatgtaaatcaaggaactcttgtggtcttcaatttggatgcatctgtatcaaatgatgaccttcgcctaatatttggggcatatggagaggtcaaagagataagagaaaccccacacaagcggcaccataaattcattgaattttatgatgttagagctgcggaggcagctctcagagcattaaataagagtgatattgctgggaaacgcattaagcttgaacctagccgccctggtggagcacgtagaaatataatgcagcaaataactcaagagctggaacaagatgaagtacgaagtttccgacatcaagtaggctcaccagtggggaactctcctccaagtacttggttacaatttggcagcccagttgaacataatccattgcatggatttagcaagtccccaggacttggaactttcagccctgtaaatggaaataatttgcctgggctggcttcaattctcccccttcatgtgtctaaccctgcaaagattgccccaattggaaaggaccatggaagggttaaccatgcaaaccagatgcttgccaactcgggatcaatgcaaggggcagcctatcagcattctcgttcattcactgaccagaaattgagcacgagtcctgttcccatgtctacttttggggaatcgaaatcaaattcatctggtataggcacattgactggtcctcagtttctctggggaagtcctgcttcttactctgagagtgcgagctcctctgcttggccaacatcatctgttggaaatgcgtttccatcacatgggcaaggacagggttttccacacatcagcaggcatggatctctcctcggttcacatcaccatcacgtgggatctgctccgtctgttcttcctcttgataggcattttggcttcttcccagaatcaccagaaacatccttcatgaaccaagttgcattggggggtatgggtttaaatcgcagcactggaagttatatgatgaacatgggtggccatgcagctgtcggtgcaggcattggacttccaggaccacccctgactgaaaatggttcacccaattacaggatgatgtcattgcctaggcataatcctatgttttttggggctggttcttattctggaccagggacaattggcaatgagggatttgctgaacgtgttcgaagtcggcgagttgagaatagtgggagccagatagatagcaagaagcagtatcagcttgatttggataaaatcattagcggggaagataataggacaactttaatgattaaaaacattcctaataattggtcacccaatgatctcttatgctattgtttcccttctagatatacttcaaagatgttgctggctgctattgatgaaaatcaccgcggtacttatgactttctctatcttcccattgattttaagaataaatgcaatgtgggttatgccttcatcaatatggtgtctcctgcatgcatcatttccttctatgaggcatttaatgggaaaaggtgggagaagtttaatagtgaaaaagtcgcttcacttgcatatgcacgaattcagggcaaggctgcccttgtgacacactttcagaattcaagcttaatgaatgaagataagagatgccgtccaattctcttccactctgagggccaagaggctactgatcaggaacctttcctatctggtaacttaaacatttgtatccgtcagcctgatggatcatattctggggattcgttggactgcccagaggacagtctggatgagaaactggagaagaattaacagctgaaattgctcttggccttgaatggtggtcaggagtgctaaccattgtgtaggcattttgaatgtataaatttgga

SEQ ID NO: 343 - protein, 868 aa, Populus trichocarpa
MEQNSKDAVPGPSKIPAVNSSKKVVTGAWGIPLRIDAFQSSSDASLFSSSLPVLSHEKLNFNDSENYGRSIDDSPPSLNNLDLETEVTDLFEDIEPSAIGNLLPDDDELLAGIMDDFDLSGLPSQLEDLEEIDLFGPGGGMELDFESQESLRIGMSKLNMTDGIPANGVGHYALPNGVGTVAGEHPYGEHPSRTLFVRNINSNVEDSELRSLFEQYGDIRTLYTACKHRGFVMISYYDIRDARTAMRALQNKPLRRRKLDIHFSIPKDNPSEKDVNQGTLVVFNLDASVSNDDLRLIFGAYGEVKEIRETPHKRHHKFIEFYDVRAAEAALRALNKSDIAGKRIKLEPSRPGGARRNIMQQITQELEQDEVRSFRHQVGSPVGNSPPSTWLQFGSPVEHNPLHGFSKSPGLGTFSPVNGNNLPGLASILPLHVSNPAKIAPIGKDHGRVNHANQMLANSGSMQGAAYQHSRSFTDQKLSTSPVPMSTFGESKSNSSGIGTLTGPQFLWGSPASYSESASSSAWPTSSVGNAFPSHGQGQGFPHISRHGSLLGSHHHHVGSAPSVLPLDRHFGFFPESPETSFMNQVALGGMGLNRSTGSYMMNMGGHAAVGAGIGLPGPPLTENGSPNYRMMSLPRHNPMFFGAGSYSGPGTIGNEGFAERVRSRRVENSGSQIDSKKQYQLDLDKIISGEDNRTTLMIKNIPNNWSPNDLLCYCFPSRYTSKMLLAAIDENHRGTYDFLYLPIDFKNKCNVGYAFINMVSPACIISFYEAFNGKRWEKFNSEKVASLAYARIQGKAALVTHFQNSSLMNEDKRCRPILFHSEGQEATDQEPFLSGNLNICIRQPDGSYSGDSLDCPEDSLDEKLEKN

SEQ ID NO: 344 - DNA, 2974 bp, Sorghum bicolor
atggccgcaaataacaacccgtggaggggccctttgccaccactgctcaatgctcgtgctggttttggtgatacaagcctcttctcaagctcactgccggttctttctcacgaaaagttgatcttttctgattctgctcatggtaccccatcaatggatgacacttcggccaaaatgaaattgcttgctgatgatcctgatgagaaggactacaagtttgattttgatcttcgacagatagatgacttgttgcctgatgaagatgagtttttcgcggggatcacagatgagactgagcctgttgggcagacaaataccacagaggaattggaggagtttgatgtctttggcaatggagggggcatggagctggacattgaccctgtggagagcatcacagttggttttgcaaattcaagtattgttgacggggctagaggcaatggcatcaacccttttggtgtcccaagcacagtaggaactgtggctggggagcatccatttggagagcacccttccaggaccttgtttgtaaggaacatcaatagtaatgtcgaggactccgagctgcgatctttgtttgagcaatatggggacatccggaccctttacactgcaacaaagcacaggggctttgtaatgatttcttatttcgatatcagagctgcacggaatgcaatgcgagcattgcagaacaaacctctgaggagaagaaagctggacattcatttttccatcccaaaggagaatccatctgacaaagatttaaaccagggaactcttgttatttttaacttggatccatcagtttctaatgaagaggttcgccagatttttggggcatatggggaagtaaaggagataagagagacaccaaacaagaaacatcataagtttatagagttctatgatgtaagagcagcagaggctgcacttcggtcactgaataaaagtgagatagctggaaagcggatcaagttggaaccaagtcgtcctggtggaacacgcagaaacttcatgcagcagcttggtcatgatttggaccaagaggagcccagaagctacagacattctcatgttggttcacctgttgctaactctcctccaggggcatgggcctatagtagtccaacagataacaatatgctgcaagctttcacaagatctccaacaggaaatggaatgagccctatcggaatgccttcactgatttcaaatgctccaaagattgctcctattggcaaggatagcaattggtctaaatatgatcaagtcttctcaaatggtaaccagtcccagggagctgcatttcagcactcccactcataccaagatcacaacagtgaatacatgagttctagtcctgggactttatcagggccccagtttctctggggcagtccaaagccatattcagaacattcaaaatcccctatttggcgtccaccagcaattggacctgcattgtcatccagcagtcgcactcagggccaaggattcttgtacagtagccgtcaggcttcattatttggttcttcagatcagcaccatcatcatgttggctctgccccttcaggtgctccattcgagagccattttggcttcttacctgaatcgccagagacatcttttatgaagcaagtcaggtttgggaacatgggtaatgttggtactggccgaaatgggggagccctcatgctgggcatggctggtcgtgcttctgtgaatcctggttcttctctaattggaagtctgacagataacagctctactaacttcagaccgatattgtcaccgagattgggacaggctttttacactaatcctccataccatgggcctggtacattcggacttgacaactccattgaccgtgcccgtaaccgccgagttgacagtagtgtgctgcaagctgatagcaagaggcagtatcagcttgacttggagaagattcgcagaagtgatgatactcggacaacattgatgattaagaacatcccgaacaaatatacatctaagatgctcctggctgcaattgatgagtttcataaaggaacttatgacttcttctacctgccaattgatttcaagaacaaatgcaatgtcggatatgcattcattaacatgatatcacctgtgcacattatatccttttaccaggcttttaatggtaagaaatgggagaagttcaacagcgagaaagtagcctcgctggcttatgctagaattcaaggacggtctgcactgatatcacattttcaaaattcaagtttgatgaatgaggataagaggtgccgccccattctttttaatcccaatggccaggactctgtgaatcaggaagcatttccaatcaatggcatatgcatccacatgcctctggaagatgattgccttgacaatgaagaagacaagaaccagaatgagaagacaggagagagctccaccgatatcggtgggagtttgtgacatcagtgatgagagcaaacaggatcggaatggccatatatataaatctaactgtctagagagtatccacccccaaattgtataaaaagcgaggaaggttgatggttagcgctgaattttgtggtctggtgtggcatggcacgtctattggttttagtcgcaacagatgtcgcccccggaagcggaagctgaagcgagcgagtgagcttagaactggagctgggagcttgcttgtcgcacccccttcacactttagagataaagatgtgggggggagggaaccgttgctgctcatagttgtgcttgattttggttggttgctgtaaaaaggtgaactgaactgaagaaatttagccaaactgtacagtttagaacttttgtgcttatttcccttctggtatgttaatgtgcagtggtgaaattgggatcttggtcatgcaaagaattgatgtacatgttctttgcataattgtaatttacaacatcgaagaaatctgaccaaaat

SEQ ID NO: 345 - protein, 822 aa, Sorghum bicolor
MAANNNPWRGPLPPLLNARAGFGDTSLFSSSLPVLSHEKLIFSDSAHGTPSMDDTSAKMKLLADDPDEKDYKFDFDLRQIDDLLPDEDEFFAGITDETEPVGQTNTTEELEEFDVFGNGGGMELDIDPVESITVGFANSSIVDGARGNGINPFGVPSTVGTVAGEHPFGEHPSRTLFVRNINSNVEDSELRSLFEQYGDIRTLYTATKHRGFVMISYFDIRAARNAMRALQNKPLRRRKLDIHFSIPKENPSDKDLNQGTLVIFNLDPSVSNEEVRQIFGAYGEVKEIRETPNKKHHKFIEFYDVRAAEAALRSLNKSEIAGKRIKLEPSRPGGTRRNFMQQLGHDLDQEEPRSYRHSHVGSPVANSPPGAWAYSSPTDNNMLQAFTRSPTGNGMSPIGMPSLISNAPKIAPIGKDSNWSKYDQVFSNGNQSQGAAFQHSHSYQDHNSEYMSSSPGTLSGPQFLWGSPKPYSEHSKSPIWRPPAIGPALSSSSRTQGQGFLYSSRQASLFGSSDQHHHHVGSAPSGAPFESHFGFLPESPETSFMKQVRFGNMGNVGTGRNGGALMLGMAGRASVNPGSSLIGSLTDNSSTNFRPILSPRLGQAFYTNPPYHGPGTFGLDNSIDRARNRRVDSSVLQADSKRQYQLDLEKIRRSDDTRTTLMIKNIPNKYTSKMLLAAIDEFHKGTYDFFYLPIDFKNKCNVGYAFINMISPVHIISFYQAFNGKKWEKFNSEKVASLAYARIQGRSALISHFQNSSLMNEDKRCRPILFNPNGQDSVNQEAFPINGICIHMPLEDDCLDNEEDKNQNEKTGESSTDIGGSL

SEQ ID NO: 346 - DNA, 3166 bp, Solanum lycopersicum
ctatctctccaccgcgtgtgactctgtgttgtgtaattggtggggtttcgtgccatttttctctctctcttaactagtgtcccgccgggagagaaggaagttgttcttttggcagtttgtgattttcccaactttaatcaacttttcatcatctatgagaaactgactagatggagaagtctctaaagaaactcatttcagatgattctgaagttccatcagcaaagacttctggtgtagagacgaatgcttggaaaattcacctcggaacagctgcacatcatccatcaactgatgcaagcttgttttctagctcgttgcctgttctgccacatgcaaaattgaacttcgctgaatctgagaactacagtcactccactgatgatagctcacctagcttaaacagacttcatttagaagatgaaattaaagatccactggaagaggaaccaaactcagatgggtgttttctccctggggatgaagatgagctactagcaggcctaatggatgattttgatcttagtgggttgccaactcagctggaggacttggaagatgatttttttggcagtggcggaggactagaattggaatctgagactcttgataattcacttaatggttttgcaaaattaagcatgtctgatggtattcttggaagtattgttggacatcatgtcttctcaaacagtgctggaactgttacgggagaacacccgtacggagagcatccttctaggacactgtttgttcggaatattaacagcaatgtagaggactccgagctgcaatctctctttgagcaatatggtgatatcagaactttgtacacttcatgcaagcataggggtttcgtgatgatatcttactatgatatccgagctgctcgaaccgcaatgcgtatgctgcaacataagcctctaagacggagaaagctagacattcatttttcaattcctaaggaaaatccatcggagaaagatattaaccaaggaacactggtcattttcaacttggatccttcagtatccaatgaggatctcctccaaatatttggggattatggtgaagtgaaggagataagggagacaccgcataagcgccatcataaattcatagagttttacgatgttagagcagctgaggcggccctcaaggctttaaataggagtgacatagctggtaagcggatcaagcttgaacccagccgacccggtggagcccgtcgaagcttgatgcagcaacttagtcaagactatgaacatgaagaagttcgaacatttaggcactcggttggttctccaatcgcctctcctccaggcaactggtcaaactttggcagtcctgttgagcacagctcattgctaggttataatcaatcacgtgatatgagaaatctcagccctgtaaatggcaaccatatgccagggctggctgctattcttcctggccatttttcaagtcctaagattgcacccattggtaaagatccaggacgatttggctctttgaatcatgcaattactagtcccaagtcggtgcaaggaatgggttatcagcaatcatattcagttcctgatcataaaccacatttaagctttggatctatgtcgcatggtgagcctaagtcatctgggattgggacactttctggcccgcaatttctatggggaagctcccctattcagtcagagcgtaccgactcttctgtctggtcaaactcatcattggcacatccatttgcagcaaacgaacaagggcaaggctatccatattcccatcgacagggcttgttccccggatcacatcatgtgggatctgctccatcaggaattcctctggataggcgtttgggttttttttccgagtctcctgaaacctcatatatgaaccaagttgcatatggtagttcaggttctagtcatagtcatggtatgagtataggtcgccttgggtcaatgaacatggctggttctcctatctctagaatgattccactgcctaggaacgggcctatattttttggaaatggctcatatggaggaacaggaacgactaacaatgaagggataatcgaacaagttcggagtcgaagagttgaaagtggaagtgagatagacaacaaaaaacaatatctgcttgatttggagaagatcacgagtggagaagatgctaggactactttaatgattaaaaacatcccaaacaagtatacctcaaggatgctactcacagcaattgatgagactcataagaatacatatgatttcctctacttgcctattgacttcaagaacaaatgtaacgttggttacgccttcatcaacatggtgtctccttcacatatcatctccttttatgaggtattcaatgggaagaagtgggaaaagttcaacagtgaaaaggttgcctccttggcttatgcgcgtatccaaggaaaggtagccttggttgctcatttccagaactcaagcctaatgaacgaagacaagcggtgccggccaattcttttccggtcagagggtcaagaaacagctgaccaggaactgttgccaaccaacaatctgaacatttgtgttcgtctgcctgatggatcatattctggagattctttggatagtccaaatagtgatgtggatgcgaagctctacatgcactgagaatatcggctgactcgtaactatgatacatggtggcaatgagttctaactgtgaataggaatagtagtacataataacgtattgagccggacatcccatataatctttgtgcgcgctaggcagtgtcttgctttttgatcaaacgacactccacaacatgcggatggcaatatgttaccgaggcagagagcattttgtttgtaccttgagtgatgataattgatgttttatccaatgggagtttgataaagcattcaggcaacatgtgaagtctctctgctgttgataatgctttgctgctataattgtatagaacctctttttttacttgtttggttgtcttgtatacttgtggtgggtttgtttttccacatagtatacatgttttagagtgtaaagggactgtctccaagtgtataatatggaatacagaccctgcacttttgtatggatttcacttctttgctgacttaatgaaggcaactgttgtaattacaaattc

SEQ ID NO: 347 - protein, 830 aa, Solanum lycopersicum
MEKSLKKLISDDSEVPSAKTSGVETNAWKIHLGTAAHHPSTDASLFSSSLPVLPHAKLNFAESENYSHSTDDSSPSLNRLHLEDEIKDPLEEEPNSDGCFLPGDEDELLAGLMDDFDLSGLPTQLEDLEDDFFGSGGGLELESETLDNSLNGFAKLSMSDGILGSIVGHHVFSNSAGTVTGEHPYGEHPSRTLFVRNINSNVEDSELQSLFEQYGDIRTLYTSCKHRGFVMISYYDIRAARTAMRMLQHKPLRRRKLDIHFSIPKENPSEKDINQGTLVIFNLDPSVSNEDLLQIFGDYGEVKEIRETPHKRHHKFIEFYDVRAAEAALKALNRSDIAGKRIKLEPSRPGGARRSLMQQLSQDYEHEEVRTFRHSVGSPIASPPGNWSNFGSPVEHSSLLGYNQSRDMRNLSPVNGNHMPGLAAILPGHFSSPKIAPIGKDPGRFGSLNHAITSPKSVQGMGYQQSYSVPDHKPHLSFGSMSHGEPKSSGIGTLSGPQFLWGSSPIQSERTDSSVWSNSSLAHPFAANEQGQGYPYSHRQGLFPGSHHVGSAPSGIPLDRRLGFFSESPETSYMNQVAYGSSGSSHSHGMSIGRLGSMNMAGSPISRMIPLPRNGPIFFGNGSYGGTGTTNNEGIIEQVRSRRVESGSEIDNKKQYLLDLEKITSGEDARTTLMIKNIPNKYTSRMLLTAIDETHKNTYDFLYLPIDFKNKCNVGYAFINMVSPSHIISFYEVFNGKKWEKFNSEKVASLAYARIQGKVALVAHFQNSSLMNEDKRCRPILFRSEGQETADQELLPTNNLNICVRLPDGSYSGDSLDSPNSDVDAKLYMH

SEQ ID NO: 348 - DNA, 2907 bp, Selaginella moellendorffii
atggagatggaaactcgcagcgtcggccagctcttccccgctggcgctcgaaaattcgaggccttctcccagcacgggtggtcgcttgccgagccggactgggcaaatgggcttcacaatctagctagaaatcacgacggtgtcgccaacaacgccaatggttggttagaaaatgggagaggaagaaacccattccccgcggtttctccgataaatgggctcgcccactctctaccaaatatgctccagcaaagactcaaactgtcggaaccgacggtagtctctgatccggatgccgagactgaaactgacgagcttttcggatcgatgcaagagctcgagtcacacgctttaggcagacttcttcctgatgccgaggaggatcttttagccgaggtgggctatgcttacgagcggaacagtaacgaggatgactacgacattttcaacagcgggggtggactggagctggagggtgatccttacttgaacaactatcagattggtggcaacacagccgcagtgttggccggggaacacccctacggcgagcatccttcgcgaacgctttttgtgaggaacataaacagtaacgttgaagatgcggagctgcgagcactttttgagcaatatggtgccattcgcactttgtataccgcctgtaagcatcggggattcgtgatgatttcctactacgacatccgagcagcccgtactgcaatgcgcgccctccagaacaaaccgctcaggcgtcgaaagttagatattcacttttccattccgaaggataacccctcagataaggatgttaaccagggcactttagtggtatttaatctcgacgcctcagtgaccaacgacgaccttcggcatatttttggtgtttatggtgagatcaaagagatacgtgagaccccacacaagaagcaccacaagtttatagagttttacgatgtcagggcagctgaagctgccttgagagccttgaacagaagcgacatcgcaggaaagcgtataaagctggaacccagtcgtcccggtggtgctcgaagaagcctaatgcaacagctcactcaagagctggagcaggaagagtttcggtgtcagcaacttcaggcatcattgggtgcttcgcctgcagggcattcaccgcagtggagtactcctatgaataagttgaacgagcgaggcacttttggttccttgggtatcaagcctctaaacgtaaatgctggttcgttgcctgcacgtgtgtcctctccgctacgaaacggcatgtccgcaaatcctgattctttcatacaaccggagcggtctgttggccttcgaatccgtcagcaatttccatcgttacagattcctgacctcgacagtccaacacgggttccacccggctttggaaattatgacgagctagatgctggtacccttcagagggcagtctcgagcttgtgtgacgtgccgtctctcgagcaatcatccagagcttttggagttcctgcttcgagaaacgaggacttgtcatggaacagttcgggctcgctatactccgcgaatgccatgtaccatacggacgggcatagccgagctgcagattattcagcaacatttaccgagcagagtctgatggatggccagaataggtactactctgacttggccgagagatcagcgttaggatggccaggatctctcggcggcctgagaatgaatggttctaagggggctggcctcactcacggcggtttgaacctggctgctattgctacatcgaaaggattggtggattctcccaggttgggtgttatgtcaccacaacttaggccccgttcctttccaaatggtgcgactttggaaacttttagcgaccgttgtagaagccgaagaaccgacagcactttgactctggcagagaacaaaaagtatcagcttgacttggagcgtattcttcgcggggaagacttacggacaacactgatgataaaaaacataccaaacaagtacacgtcgaagatgctgttgtcaacaattgacgaacatcatcgcggtacctatgatttcatctacttacctattgattttaagaataagtgtaacgtggggtatgctttcatcaacatgattgcacctgtgcatatcgtccctttcttcaagaccttcaatggaaagaagtgggagaaattcaacagcgagaaggttgcttctctggcttacgctcgaatacaaggcaaggttgccctcgtcgcacatttccaaaactcaagcctcatgaacgaagacaagagatgccgtccaattctgtttcgttcggaaggtcccaacctgggcgatcctgagccattccccgttgggtctaacgtcagaactcgtccgggaaaagaacgaaatggcctctgccattttgaaacctctagcagcagcagctgctccagcaaagacgacgagaatgacaacggtggccagagttcttcggacgttgagaaggattgaaatcaacacgacgaggcaggcaagcgagaagctgaggtgggagggagtgtttttttggtgcaaggtgtacatttttctcgggagtatttcggttttggaataattttggtggtgcagcggcagaaagacaagacacgactggtgctgtattatagatcacatgacagacaaattgctaacaggcagagtgtatcggctggatggttttttgccagtgctttcctttgacgttgggaaggtttttttttcataccaacgaagacagctcaatgaagaaagcggtgggtaacttgtataaatcaaacagaaccatagagtgggataaaaaaagaaatctgatttttgtaagttttgttttcacagttaaaagtgtataatctaaaataacatcaataacatacataaaataaattatag

SEQ ID NO: 349 - protein, 829 aa, Selaginella moellendorffii
MEMETRSVGQLFPAGARKFEAFSQHGWSLAEPDWANGLHNLARNHDGVANNANGWLENGRGRNPFPAVSPINGLAHSLPNMLQQRLKLSEPTVVSDPDAETETDELFGSMQELESHALGRLLPDAEEDLLAEVGYAYERNSNEDDYDIFNSGGGLELEGDPYLNNYQIGGNTAAVLAGEHPYGEHPSRTLFVRNINSNVEDAELRALFEQYGAIRTLYTACKHRGFVMISYYDIRAARTAMRALQNKPLRRRKLDIHFSIPKDNPSDKDVNQGTLVVFNLDASVTNDDLRHIFGVYGEIKEIRETPHKKHHKFIEFYDVRAAEAALRALNRSDIAGKRIKLEPSRPGGARRSLMQQLTQELEQEEFRCQQLQASLGASPAGHSPQWSTPMNKLNERGTFGSLGIKPLNVNAGSLPARVSSPLRNGMSANPDSFIQPERSVGLRIRQQFPSLQIPDLDSPTRVPPGFGNYDELDAGTLQRAVSSLCDVPSLEQSSRAFGVPASRNEDLSWNSSGSLYSANAMYHTDGHSRAADYSATFTEQSLMDGQNRYYSDLAERSALGWPGSLGGLRMNGSKGAGLTHGGLNLAAIATSKGLVDSPRLGVMSPQLRPRSFPNGATLETFSDRCRSRRTDSTLTLAENKKYQLDLERILRGEDLRTTLMIKNIPNKYTSKMLLSTIDEHHRGTYDFIYLPIDFKNKCNVGYAFINMIAPVHIVPFFKTFNGKKWEKFNSEKVASLAYARIQGKVALVAHFQNSSLMNEDKRCRPILFRSEGPNLGDPEPFPVGSNVRTRPGKERNGLCHFETSSSSSCSSKDDENDNGGQSSSDVEKD

SEQ ID NO: 350 - DNA, 3286 bp, Triticum aestivum
aaagatttcgcctttctctctctctctctttcccctcccacacctcccctcatcgcgcgaaccaacgcagcgcagcacgggcgggcgggcggagaccaaggcgacgaggggacaagggatttccccggccgccgccgattcagtccagcagctagggttccttccccgccgccggaggcgccaggcgctaggtgcccctccccgaatgcagtgatggaccgatcgccggcacctctcagcccaccaggtttcgctgtgccgctcgccgtcaagaagcggcagcaggcggcgccaggctacagcagcagcagcagcccgtggggagtccctccggcgccgcccctcaccaacaacaacaaccccaacccgcccaatggcctcagagcaggcgacaccagcatcttctccacctcgctgcccgtactgccgcacgaaaaattgaacttccctgactctgcacatggcaccccttcgatggacgatgcgtcagcgaagcttaaagattttgatgatgatcctcaggggaacgactacccgtttgactttgatctccggcagatcgacgacctgctgcccgatgaagatgagcttttcgctgggatcacgaatgagatggagccatcttcgcaggcgaatcctgtagaggaactggaggagtttgatgtgtttggcagcggagggggaatggagctggactcagaccctctggacagcatcacagctggtttggggaatgcaagtataagtgatgggatcagggccaatggagtaaacaacaattttggcctgtcaaacagtcctggagctgtggctggggagcatccgttgggggagcatccttccaggacattgtttgtgaggaacattaacagtaacgttgaggactctgaactgcgctctctctttgagcaatttggggatatccggaccctttacactgcaacgaagcacaggggctttgtgatgatatcttattttgatatccgggctgcacgtggtgcgatgcgttcattgcagaataagcctctgaggaggaggaagcttgacatacatttttctatcccaaaggagaatccgtctgacaaagatttaaaccaggggactcttgttatctttaacttggatccatcagtttctaatgaagaagttcgccagattttcggaacttatggggaagtaaaggagataagagagacgcctaacaaaaagcaccacaagtttattgagttctacgatgttagggcggcagaagctgctcttcggtcactgaataagagcgagatcgctggaaaacgcatcaagttggagccaagtcgtcctggtggaacacgcagaagcttggtgcaacaccttggtcatgaactagaagatgaaaccagaggttataggcattctcctcacgttggatcgcctatggctaactctcccccaggggcgtgggctcaatatggtagtccaaccgacaacaatttgctgcatgcattcagcaattcacctactggaaacggaatgagccctatcggaatgtccccttcaatgatgtcaaatgctctgaagattgcaccaattgggaaggacaacaactggtctaaatacgatcaagtattctcaaacagcaaccagtcccttggcgcagcgtttcagcattcacagtcataccaagatcgcaaaagtgagcatatgagctcgagtcctgggactttaacagggcccgagtttctgtggggcagcccaaagccttatccagagcattcccaatcctcatcaatgtggcgtccaccaccagttggtcatgcaatgtcatccagtagccgccctcagggtcagggcttcctgtatggtagtcgccaggcttcattgttcggatctttggatcaaaaccgtcatcatgttgggtctgccccttctggcgctccatttgagagccactttggatttttgcctgaatcgcctgagacgtcgtttatgaatcaagttaggtttgcaaatatggggaacattggcggtgctaaccgaaacgggggaagcctcatgctgaacatggcttctcgtgcttccctgaatcctgtttccgctctaagtggaagcctgacagataataactctactaacttcagaccagtaccgtcgccaaggcttgggcaaccaccattctttgggaacaccacatatcaaggacctggttattatggacttgacagctcctccattgagcgtggtcgtaaccgccgagttgacagcagcgcgttccaggcagatagcaagaagcagtatcagcttgatttggacaagatccgtaaaggagaggatactcggacaacattgatgataaaaaacattccaaacaagtacacatccaagatgcttttggctgcaattgatgagctccacaaaggaacatatgacttcttctacctgccaattgatttcaagaacaaatgcaatgtcggttatgcgttcatcaacatgatatcccctgtgcacattgtatctttctaccaggctttcaatgggaagaagtgggagaaatttaacagcgagaaagtagcatcattggcgtatggtaggatccagggaaggaatgcactaatctcacatttccagaattcaagtttgatgaacgaggacaagagatgccgccccattctttttcattccaacgggccagagactggaaatcaggaaccatttcccaatgggatatgcatccacatgcctctggatggtggggcaggctccagcaaggagcccctcggctttgaagaggacgacaatcccagcgagatcaagatatccggggagaaatccatggcggggagtttgtagattatataaccaacgaagaggcttggagtcgccgccgcggagtctaactgtcttgtgacaaaaggcggtgtccaccccaaactgtataaaagtgaggaagattggtttagtagtgcaggaattatggcgtggcgttgcatggcgcatctaccggtttttgtcgcagcggatgtcgcccccctgaagcagcggctttgaatcgcagtcgggagtttgctaggtccccccctcttttgaccccccgaactctgtacagatagatgtggggagttgatgatgactggatgatgatgcttttggtttggttttctgtaaagaacaccaattgtacagtcggatggatacttgtgctagttctgcatgcttttattttctgtatggttgaaactcaactcaagacaggtctaatcgggtgatgccagtgtggaaatatgaatccccgcattgtgcattgtgagtc

SEQ ID NO: 351 - protein, 870 aa, Triticum aestivum
MDRSPAPLSPPGFAVPLAVKKRQQAAPGYSSSSSPWGVPPAPPLTNNNNPNPPNGLRAGDTSIFSTSLPVLPHEKLNFPDSAHGTPSMDDASAKLKDFDDDPQGNDYPFDFDLRQIDDLLPDEDELFAGITNEMEPSSQANPVEELEEFDVFGSGGGMELDSDPLDSITAGLGNASISDGIRANGVNNNFGLSNSPGAVAGEHPLGEHPSRTLFVRNINSNVEDSELRSLFEQFGDIRTLYTATKHRGFVMISYFDIRAARGAMRSLQNKPLRRRKLDIHFSIPKENPSDKDLNQGTLVIFNLDPSVSNEEVRQIFGTYGEVKEIRETPNKKHHKFIEFYDVRAAEAALRSLNKSEIAGKRIKLEPSRPGGTRRSLVQHLGHELEDETRGYRHSPHVGSPMANSPPGAWAQYGSPTDNNLLHAFSNSPTGNGMSPIGMSPSMMSNALKIAPIGKDNNWSKYDQVFSNSNQSLGAAFQHSQSYQDRKSEHMSSSPGTLTGPEFLWGSPKPYPEHSQSSSMWRPPPVGHAMSSSSRPQGQGFLYGSRQASLFGSLDQNRHHVGSAPSGAPFESHFGFLPESPETSFMNQVRFANMGNIGGANRNGGSLMLNMASRASLNPVSALSGSLTDNNSTNFRPVPSPRLGQPPFFGNTTYQGPGYYGLDSSSIERGRNRRVDSSAFQADSKKQYQLDLDKIRKGEDTRTTLMIKNIPNKYTSKMLLAAIDELHKGTYDFFYLPIDFKNKCNVGYAFINMISPVHIVSFYQAFNGKKWEKFNSEKVASLAYGRIQGRNALISHFQNSSLMNEDKRCRPILFHSNGPETGNQEPFPNGICIHMPLDGGAGSSKEPLGFEEDDNPSEIKISGEKSMAGSL

SEQ ID NO: 352 - DNA, 2906 bp, Vitis vinifera
atgaatttaggtccttccaagattccatatgtgagtattcctaaggcagtgggaagtggtgcatgggggatgcgacctggatctgatggttacaacgcatcaaatgatgctacccttttctcatgctcattacctgttcttccacatgaaaagttgaacttaaatgataccgaacattgttgtcagtctattgatgatgctggattagataaactccaacaagatgtggaggctggcgagtcacttgaggatgatggaattcatgctattggaagcttgcttcctgatgatgaggatgagcttttagctggaataatggatgattttgaccttagtggattgtctaatccaatggaggatgtggaagagtatgatctttttggcagtggaggaggcatggagttggaaattgatccacaggagagtctgaacatgggtatggcaaaggtgagcttatctgatggtgttgttgggaatggcttggctcagtatggtcttccaaatggctcgggaactgttgcgggggaacatccatatggggagcatccttctaggacgttatttgttcgtaatatcaatagtaatgttgaggattcagaactgagaactctttttgagcaatatggcgcgatcagaactttgtacactgcatgtaaacataggggctttgtgatgatatcttactatgacatccgtgctgcgcgaactgctatgcgtgcattacaaaacaagccattgcgacggaggaaactagacattcacttttcaattccgaaggataacccatctgacaaggatgttaatcaaggaactctggtagtttttaatttggatccatcagtttcaaatgatgatctccgccaaatatttggggcttatggggaggttaaagagataagggaaacaccacacaagaggcatcataaattcattgaattttatgatgttagagctgcagaagcagcacttaggtcattaaataggagtgacatagccggcaaacgcataaagcttgaacctagtcgccctggcggagcacgtcgaaacttgatgttgcaactgaatcaggagcttgaacaagatgaatctcggagtttccgacatcatgtgggttctccaatggccaactctcctccaggtagctgggcgcagttcagcagccctattgaacacagtcctttgcaatctcttagtaaatcccctggtttcaggactcaaccatttacctggattagcttcaattctgaattctcaaatatcaaattcaaaaatatattcaacaacacaaattcaaaccatggaactgctttccaacagtctcattcattttctgagccaaatttgggcccatatcctggtaatgggtcctcttttggtgcttcaacttcaaatggatctggaattgagacgttgtctgggccacaatttctttggggaagtccagctccttactcagagcacacaaattcttcagcctggcaaccaccatctatggggcatccatttgcatccaatggacagggccgtggctttccatactctgggcggcatggttctttccttggttcatcccgacaccaccaccatcatcacgttggatctgccccatcaggtgttccattagagaggcactttggttacttcccagaatcaccagaagcgtcattcatgactcctgttgcttttggaggcatgggtttggcccacaatgatggaagtttcattgctcgcgctggcatgaatgctggcatttctattccagcaaacatgtctgaaagtggttctgccaattttagaatgatttcttctccaaggcttagccccatgttcccaggtaatggtccatttccaggtctggcaccctccaacatagagggtttagctgatcgtggacggagtcggtgggttgagaataatgggaaccagatagatagcaagaagcagtttcagcttgacttggataaaattctcaatggggaagatactcggacaactcttatgattaaaaatattcccaataagtacacctcaaagatgttgctagctgctattgatgaatatcacaggggtacttatgatttcctttatctgccgattgactttaagaataaatgcaatgtgggctacgcatttatcaatatgctgtctccttcgcacattatcccgttctatcaggcttttaatggtaagaagtgggagaaattcaatagtgagaaagttgcttccttggcatatgctagaatccagggaaaggctgccctagtcacacatttccagaattcaagcttgatgaatgaagataaacgctgtcggccaattctcttccactctgagggtccggaagctggtgatcaggaacatttgccctccaacagtttgaacatccaggttcctcagccgaatgggtcacaaataggtgatactccggaaagccctgaaatggttcttttgtgtgagaagccagagaagagttgatgatgtcttggagcagatatgcgcttagcccaagttgatgctgtggctgtaaaggcaacggttgcgtaaataattttgtgtaaaagaattaggaagagatgacccaagaaaagtgtgcagattttgttatgtagttttgtgtcccatatcattttggtagaaagctttcggagtagcaggagtattttgtagttgatgagcaggccagtgatgaggaatggaggatgataaggtgaagcatagaggtggaactgacttttgtcaactgctgaatgtgtcaccaatatgtgcacgatttccattgtgctctgaactccatgttggagtcattgtcttttttgttcctcgttgggtagaagttcaatgcgctgcatatatggtgtttatatgggtgaatgtaattgagggttgaacttttagaattggtgatc

SEQ ID NO: 353 - protein, 824 aa, Vitis vinifera
MNLGPSKIPYVSIPKAVGSGAWGMRPGSDGYNASNDATLFSCSLPVLPHEKLNLNDTEHCCQSIDDAGLDKLQQDVEAGESLEDDGIHAIGSLLPDDEDELLAGIMDDFDLSGLSNPMEDVEEYDLFGSGGGMELEIDPQESLNMGMAKVSLSDGVVGNGLAQYGLPNGSGTVAGEHPYGEHPSRTLFVRNINSNVEDSELRTLFEQYGAIRTLYTACKHRGFVMISYYDIRAARTAMRALQNKPLRRRKLDIHFSIPKDNPSDKDVNQGTLVVFNLDPSVSNDDLRQIFGAYGEVKEIRETPHKRHHKFIEFYDVRAAEAALRSLNRSDIAGKRIKLEPSRPGGARRNLMLQLNQELEQDESRSFRHHVGSPMANSPPGSWAQFSSPIEHSPLQSLSKSPGFRTQPFTWISFNSEFSNIKFKNIFNNTNSNHGTAFQQSHSFSEPNLGPYPGNGSSFGASTSNGSGIETLSGPQFLWGSPAPYSEHTNSSAWQPPSMGHPFASNGQGRGFPYSGRHGSFLGSSRHHHHHHVGSAPSGVPLERHFGYFPESPEASFMTPVAFGGMGLAHNDGSFIARAGMNAGISIPANMSESGSANFRMISSPRLSPMFPGNGPFPGLAPSNIEGLADRGRSRWVENNGNQIDSKKQFQLDLDKILNGEDTRTTLMIKNIPNKYTSKMLLAAIDEYHRGTYDFLYLPIDFKNKCNVGYAFINMLSPSHIIPFYQAFNGKKWEKFNSEKVASLAYARIQGKAALVTHFQNSSLMNEDKRCRPILFHSEGPEAGDQEHLPSNSLNIQVPQPNGSQIGDTPESPEMVLLCEKPEKS

SEQ ID NO: 354 - DNA, 3085 bp, Vitis vinifera
atgaagcctaaaatgcatagacgtgtgcatttgtcaaacaagtatatggtaatttacatatatgtcatgaatctcctgaatagctatatttgttttgtaggtccgttcaagattccatctctaaatgttcctaagaaaataggaagtggtgcatgggggatcccacatggaactgatgcttatcatacatcaagtgatgttagcttgttttcaagctcgttacctgttctgccacatgaaaagttgcactttaatgattcagagcattgtggtcactctgttgatgatggctcacctagcttgaataaacttcagcaagatgaagaaagtaaggatccacttgaagatgttgatctgaatgcaattggaagcttgcttcctgatgatgaggatgagcttttagctggcatcatggacgattttgatcttagtgggttgcctacccaagtggaagatttggaagatgatctctttggcagtggaggaggaatggagttggattttgatattggtatttcaaagttaagcctatctgatggtgttgctggaaatgggattggacattatggccttccaaatggtgtggcgacagttgctggggagcatccatatggggagcatccttcaaggacattatttgttaggaatatcaatagcaatgttgaggactcagagctgaaaactctctttgagcaatatggggacatcagaactctgtatacagcatgcaagcataggggctttgtgatgatatcttactatgacattcgggcagctcgaactgctatgcgtgcactgcagaataagcccttaagacgaaggaaacttgacattcatttttcaattcccaaggataacccatcagagaaggacattaaccaagggactcttgttgtgtttaatttggatgcatcggtatcaaatgatgaccttcgtcaaatattcggtgcttatggagaggtcaaagagatcagggaaacaccacacaagcgacaccataagttcattgaattttatgatgttagagctgcagaggctgctctcagagcattaaataggagtgacatagctggaaaacgcataaagctagaacctagtcgccctggtggggcacgtcggaacttgatgcagcaactgagccaagagctggaacaagatgaagctcgaagttttcgacatcatgtaggttcaccagttaccaactctcctccaggtaactgggcagcattcagcccagttgaacataatcctttgcaagcttatagtcattcccctggtttgggaaatatcagccctataaacagcaaccatttgcctgggttagcttcaattcttccccctcatatatcaaactctgtgaagattgcacctattggtaaagaccaaggaagggttaaccatgtgaatcagatttctcattctgttcctgagcaaaaattaagtgctagccctggacccatttcttctcttggtgaatcaaattctaattcatctggtattgggacattgtctggccctcagtttctctggggaagccccactccttactctgagcgccccaattcttctgcctggccaacatcatctgtggggcacccatttgtgtccagtggacaaggacaaggttttccctattctaatcagcatggttctttccttggttcccatcaacaccatcatgtgggatctgctccatctggtgttcctcttgataggcattttggctacttccctgagtcaccagaaacatccttcatgagcccttcgcagcaatggaaattttgcaatgaatctattaacactggaaacatgaccgaaaatggtttgcctagtttcagaatgttatcattaccgaggcatggtcctccattccttgggaatggtacttatccagtatcaggagtgaccagcaatgaggtattggctgaacgtggtcgaactcgtcgatatcagcttgatttggataaaatcattagtggggaggatactaggactactttaatgattaaaaacattccaaataagtacacctcaaagatgttactggctgctattgatgaaaatcataggggtacctatgattttctatacttgccaattgattttaagaataaatgtaatgtgggttatgcctttatcaacatggtgtctccttcgcacattatccccttttatgaggcatttaatggaaagaagtgggaaaagttcaacagtgaaaaagttgcttcattggcatatgcgcgaatacaaggcaaggcagcccttgttacacacttccagaattcaagccttatgaatgaagataagcgatgccgacctattctcttccattcagagggccaagagactgttgatcaggaaccttttgcttccggcaatttgaacatctgtatccgacagccagatgggtcttactctggggattcattggagagcccaaagggtaatttggaagattagccagagaagtattaaccattcattgaaatagcttactctcaactttcagatatggtggctccaagtgctaactggtacataggtataataggtatataaacttaaaatgagaaatcaaagaattgccgcattattgcttgtatgataggcagtatcggcttttgagtgatggatatcgtcatatttcgcaagagagcaaggaaaagatgcagagggtttttgtttatatgtagagcaggaaattgttatttgaccaagggagaagaataaggtgaagaggcatacacaactgaaaagggaagtctctgctgccaaatgcattgatcaccagcttgttcatgatcctcctttgggggttttccttttctgttgtctttaagttttatgtgttgggtcttttgtctatttgcaaatattccatggttgtgtcatgtgtacatgtgtatgggacttggaacaggttaagggctgttagcaaattgtatagagagaagacagcagaccctgcatcctgtttgtcatgtgttctttcttgttgacaaaatagctatgaacaatatgtattttatgctattgtatagatatttcattgtgcctaaatgattctgaagttgaattcataagc

SEQ ID NO: 355 - protein, 819 aa, Vitis vinifera
MKPKMHRRVHLSNKYMVIYIYVMNLLNSYICFVGPFKIPSLNVPKKIGSGAWGIPHGTDAYHTSSDVSLFSSSLPVLPHEKLHFNDSEHCGHSVDDGSPSLNKLQQDEESKDPLEDVDLNAIGSLLPDDEDELLAGIMDDFDLSGLPTQVEDLEDDLFGSGGGMELDFDIGISKLSLSDGVAGNGIGHYGLPNGVATVAGEHPYGEHPSRTLFVRNINSNVEDSELKTLFEQYGDIRTLYTACKHRGFVMISYYDIRAARTAMRALQNKPLRRRKLDIHFSIPKDNPSEKDINQGTLVVFNLDASVSNDDLRQIFGAYGEVKEIRETPHKRHHKFIEFYDVRAAEAALRALNRSDIAGKRIKLEPSRPGGARRNLMQQLSQELEQDEARSFRHHVGSPVTNSPPGNWAAFSPVEHNPLQAYSHSPGLGNISPINSNHLPGLASILPPHISNSVKIAPIGKDQGRVNHVNQISHSVPEQKLSASPGPISSLGESNSNSSGIGTLSGPQFLWGSPTPYSERPNSSAWPTSSVGHPFVSSGQGQGFPYSNQHGSFLGSHQHHHVGSAPSGVPLDRHFGYFPESPETSFMSPSQQWKFCNESINTGNMTENGLPSFRMLSLPRHGPPFLGNGTYPVSGVTSNEVLAERGRTRRYQLDLDKIISGEDTRTTLMIKNIPNKYTSKMLLAAIDENHRGTYDFLYLPIDFKNKCNVGYAFINMVSPSHIIPFYEAFNGKKWEKFNSEKVASLAYARIQGKAALVTHFQNSSLMNEDKRCRPILFHSEGQETVDQEPFASGNLNICIRQPDGSYSGDSLESPKGNLED

SEQ ID NO: 356 - DNA, 3012 bp, Chlamydomonas reinhardtii
atgcctctcgcaggcgtcggctctgaggccggcagcctgcagcagcagtccagcatgatgaagaacgcatcagatcccagcctgaggtcgaccagctccagttttgcggacctggcggagacggccgcgtttggcaggcaccagttccagcgtcacgaggagcaggatatcttcagcgcggtgggcggtatggagctcggcgtggacgcggacctggactcgctgggggcggacatcgcatccaccagcggccacgagccgcactcggagccctctcgcacgctgttcgtgcggcacatcaaccccacggcctcggacgaggagctgctggccatgttcaaggtgtttggcgacgtgcggcacatgtacatggtcagcaagcaccgcggcttcatcatggtcacctattttgacctgcgcgcggcggcgcgggcccaggcggcgttgcacggcgcgcccatcacgtcgttgccgctcgacatccacttctgcgcgcccaagggcgaccccaccgtcagccagggcaccgtgtccctgttcaacctggaccccgacacctcgaatgaccatctcgtctggctgttctccaagttcggcgacgtcaaggacatccgcgagtcgcccgatcgccgcagccagaagttcatcaccttttacgacacccgccacgcgctggcggctctgcgtgccatgaataaggccgagcacctgggcaagctgccctccaacatcacgccgcagctggcggcctcgctctcgcaaatgaccatgcacgacacgtccgcgggcggagaggcggcgcagctggcggccagcaaaagccacccctcgcgcgcctcctcgcagcccgggaccacgtcaccgagccccctgccgggcacctccccggcagggccccccttcatgtccgcccaggcccgcacagacatgcatcaggtgtccccgcaggtggctgcgggcttgcgcagcggcatgcacgtgtccgactcggcctccagcatgtcgggctccgtaagtggccaggccgccgccaccagccagctgctggcggcggccgccgccgccgcgggccgcagcccgctgggcatgcaggggccacacggcctgcatggtccgcatgggccgcacggccacgcgcacgcgcacatgcacaaggtcgtgccatcgctggccacgctctcggaggcgcaagcgctggatgaccccactgcgggactgtacgccgccgctgcagcggccgcagccgccggcagcatggggtcgatgctcacgggcagcggcgctggcagcggcgtggggctggaccagtccagcggcggcagctccgccgcggacgtcaacgccaccgccaacatgctcatggggctgcagctgagcgcggcggcggcggggcaggtgtcagcgtcaccggagcagcagctgtgggcgctgcagcagatggcggcgagcggcggcgcgggacagggccagggtccgatgtggggcgccggcggcgcgatgtacaaccagcaggcggcgcacggcgcagcggcggcagccgcggcggccgcgaacctgcaggcgctgcgcaacctgcaggagctgcaggcgcggcagcagcaacagcagcagcagcagcagcagcagctggccatggcggccaacctggccacgctgcagggccaggcgctgtccgcggcggagctcaacgccgcggcggcgcagctgctgcacatcgccggcctgggccaggccctgggccccgccggcggcgcgggtgcgccctttggcggcgccggcggcctgggtgcgctgggtgcgctcggcggcctcggcgctggcggcgccggtgggctgggcgcgaacgccgctgctgcgcagcagctgctgcagcaggcgatggccatgggcaacgtcaacgcgctcagcgcgctcggcaacatgcaggccgccgcgctggctgccggcgtgggcgcgggcggccggctcggcggctcgttcggcgcgctggcgggcctggcgggcgtgcatggccacccgggcggcccgggcgctgccggccgcgacgccgctgccaacagccgcggcggcggccggctgagccggcgcaccacagacccggccgcggagatggagcggaagatgcagcaggagaagctgtacgcgctggatgctgtcaagatccgcagcggcgaggacaagcgcaccacactcatgatcaagaacatccccaacaagtacacgcagaagatgctgctggccaccattgacgagcagttccgcggcacgtacgacttcttctacctgcccatcgacttcaagaacaagtgcaacgtgggctacgccttcatcaacatgatcaaccccttcgacatcatcgcgctcgtcgagcgcttcaacaaccgccgctgggagcgcttcaacagcgagaaggtgtgctccatcagctacgcgcgcatccagggccgcgccgcgctggtggcgcacttccagaactccagcctcatgcacgaggacaagcgctgccggcccatcctcttcaccgccaacggcacggagaccaccgaccccgaggccttccagaacgacccctcgctgcagccgccacaccacgggatgggcggccccggcggccccggcggcagctcctcctcgctgccgcaccacaatgccggcggcatggccggctccagcctgtctggcgccggcgggtcctccgcctcgctgggctctatgcactcggccgcagccggggcgacctcgccgcccacgggcggcgcaggcaccagcctcggcggcatgtcggcttcttcggcggcggcagcgatggcgggtccggccaggatccgcgccgccgccgcagctgtggccgccgccggcgcgtcgggcggcatgctggtcggaatgggcggccacggcggtggccatggacacgccaacttgggcggcagcagccagggtcagctgaatttggacatgctgtcgggcatggcgcatcacggagcgcacggtggcaccggcggcggcagctag

SEQ ID NO: 357 - protein, 1003 aa, Chlamydomonas reinhardtii
MPLAGVGSEAGSLQQQSSMMKNASDPSLRSTSSSFADLAETAAFGRHQFQRHEEQDIFSAVGGMELGVDADLDSLGADIASTSGHEPHSEPSRTLFVRHINPTASDEELLAMFKVFGDVRHMYMVSKHRGFIMVTYFDLRAAARAQAALHGAPITSLPLDIHFCAPKGDPTVSQGTVSLFNLDPDTSNDHLVWLFSKFGDVKDIRESPDRRSQKFITFYDTRHALAALRAMNKAEHLGKLPSNITPQLAASLSQMTMHDTSAGGEAAQLAASKSHPSRASSQPGTTSPSPLPGTSPAGPPFMSAQARTDMHQVSPQVAAGLRSGMHVSDSASSMSGSVSGQAAATSQLLAAAAAAAGRSPLGMQGPHGLHGPHGPHGHAHAHMHKVVPSLATLSEAQALDDPTAGLYAAAAAAAAAGSMGSMLTGSGAGSGVGLDQSSGGSSAADVNATANMLMGLQLSAAAAGQVSASPEQQLWALQQMAASGGAGQGQGPMWGAGGAMYNQQAAHGAAAAAAAAANLQALRNLQELQARQQQQQQQQQQQLAMAANLATLQGQALSAAELNAAAAQLLHIAGLGQALGPAGGAGAPFGGAGGLGALGALGGLGAGGAGGLGANAAAAQQLLQQAMAMGNVNALSALGNMQAAALAAGVGAGGRLGGSFGALAGLAGVHGHPGGPGAAGRDAAANSRGGGRLSRRTTDPAAEMERKMQQEKLYALDAVKIRSGEDKRTTLMIKNIPNKYTQKMLLATIDEQFRGTYDFFYLPIDFKNKCNVGYAFINMINPFDIIALVERFNNRRWERFNSEKVCSISYARIQGRAALVAHFQNSSLMHEDKRCRPILFTANGTETTDPEAFQNDPSLQPPHHGMGGPGGPGGSSSSLPHHNAGGMAGSSLSGAGGSSASLGSMHSAAAGATSPPTGGAGTSLGGMSASSAAAAMAGPARIRAAAAAVAAAGASGGMLVGMGGHGGGHGHANLGGSSQGQLNLDMLSGMAHHGAHGGTGGGS

SEQ ID NO: 358 - DNA, 3117 bp, Chlorella
atggatggcagcatcagcgacgaccccatccgcacatcctggggcaccttcctgacccgcgcccaggatgaagtcgtctatgccatcgagcaccgggtggccaactggacgcacctgccagtagagaatgcaggtggggttctccagggcaagaggttccattacggcgcccactgggacgacctagacctggatgagaaccccgacggcctgggaggcgggagtgtgagggtggccacagtgctgatctatctgagcgatgcggaggagggcggcgagactgctttcccccactctcgctggctggacaaggagaagcagacggcgggcaaggcgttttccaactgcgccaaggatggcgtggctgcgttggcacgcaaggggaacgcgataatgttctgggacgccaagcccggcagcatgcggcaggacaaatggtcaatgcacacaggcgcccgcaccatgctgagtgcgcaggcctcggccgctggccaggctgcgcccagctggccaggcgcgccgcccgaccatgcccatgttgcggccagtggctccccgcagcagctgtcagccagcagtggcagcagcccgcagggccaggacattccagcgcctttggcaggggctctggtgggcgcgcccgacacggcatccgcctcctcacagcaaactagcctgttcccgcgcttcagcccagacgcgcccgaactgtttgccagcagtggcagcacggcggcggcggctgccgccgcgcagcagcaacagcagcagcaggcggcggcactcaagcagaacctgcaaaagctgtatggctcgctgggactgcagcacggcagccgcagctcgctgcccgacatccaggagaacgagccacagaccagcctgccatccgacccgccgctgtcgcagcggctcccgccgtatggccgcccgccgtcaggcagggcactgtctgatgaggatctgtttggcatgcaagacctaggacaggcagcgcacgtggcgcatggcggcagcgctgctgccaacgccacgagtggcgcgctgcctgccgcagggccacccccggcggcagacctcagcttggtgggccagcttccggcaggcacctcccagtcacgcaccctgtttgtgcggaacgtagaccctagtgtgcctgaagacgagctccgcacgctctttgaggcctttggcgaggtgcgcagcttgtacacggccgccaaggcgcgcggctttgtggtggtcagctactatgacacgcgtgccgccacgctggccaagcacacgctcacagggcagatgctggcagggcagcagcttgatgtgcatttttcgctgcccaaggatgaccgcgaggctgcacagggcacgctgctggtggcgagcctggacgcgggcagcagccgccaggagctgctctacctgttcagccagtacggcgagctgcgggacgtggctgacgacccactgggccgccccaactgctgtctggtggagttctacgacacgcgacacgcggctgcggcgctgcagggcatcagtcaggcgcccgacatggctagccggctggtagtgatggacccaagtgcggcggcggtgttgccacaggcgggccctggagcgccatcagcggccgcagcccagctcagcacctctctgtctcacgactaccttgcagccatgccatctggcgggcagccaggcagccagtatggcggcggcatgcgcaatgttggctcctcccccgccttgctctatggcggcggcacccacggcagcagcagtcagctagactacctgttggcgggcggtggcggcgctgccttacacatgcaccagcagcaggcggccgccgccgcagctgcgcagcagggcggtggcggtggcgccggcagttttgaccccactgcacagctcctgtcagggctggcagccgctgacccgctggcgggcatgaaccgcagctttagcgagatgagcctggagagcagcagtggggcgctcggcggccgctttgctcccaacagcatgagcacgggtgacctcctggcgatgacccaggggctccaaggtgcaggctccagcgccctgcgtggcatcgcctccacaggttccatgtggccccaccaccagcaccatgccagtctgggcagcagcccggtgggcacgggcgcctggcccgctgcgctggtgggcggctcccatggcagcctgcaggacctgctgcagaagcaggcggccgtgaatgcagcgctgcagcagcaggcggcggcggtgaatgcggcggcgctgatgcagcagcccaaccagctggtgcagaacgctgcgctgcaggcggcgatgcagcaggcgctactgacacagcaggcagcggcgctgctcgggcatggcgggctgcagggtgcagggctgctgggcggcggtgggcggcgcggcgtggagccaccgctagggggccgcctcgcacgccgcccgctcgacccggtggcagaggcggagcgccgcatgcagcaggagaagctgtacagcctggacctgaacaagatccgggctggggaggacaagcgcacgacgctgatggtaaagaacatccccaacaagtacacacagaagatgctgctggcgctggtggaggagcgcttccgcggcatgttcgacttcttctatttaccaatcgatttcaagaacaagtgcaacgtgggctacgcattcatcaacatggtgcgccccgagtacatcgtcccgctggtggaggagctgcacggcaagaagtggcccaagttcaactcggaaaaaatatgccacatcgcctacggtcgcatccagggcaaggcagcactggtgcagcattttcaaaactccagcctgctgcacgaggacaagcggtgccgccccatcctattccacacaaatgggacgctggcaggcgaggtggagcagttccccggcacgctgtcctcgcccattgtgcccgccgctgcagcaggcgccacctccgtgccggccatggccgccgctgcggcatctgtggctgcggtagctgtgcacggcacagcggcgccacaggttggacagtctggctcagctgttgtgctagagcccgaccggggtgtctaa

SEQ ID NO: 359 - protein, 1038 aa, Chlorella
MDGSISDDPIRTSWGTFLTRAQDEVVYAIEHRVANWTHLPVENAGGVLQGKRFHYGAHWDDLDLDENPDGLGGGSVRVATVLIYLSDAEEGGETAFPHSRWLDKEKQTAGKAFSNCAKDGVAALARKGNAIMFWDAKPGSMRQDKWSMHTGARTMLSAQASAAGQAAPSWPGAPPDHAHVAASGSPQQLSASSGSSPQGQDIPAPLAGALVGAPDTASASSQQTSLFPRFSPDAPELFASSGSTAAAAAAAQQQQQQQAAALKQNLQKLYGSLGLQHGSRSSLPDIQENEPQTSLPSDPPLSQRLPPYGRPPSGRALSDEDLFGMQDLGQAAHVAHGGSAAANATSGALPAAGPPPAADLSLVGQLPAGTSQSRTLFVRNVDPSVPEDELRTLFEAFGEVRSLYTAAKARGFVVVSYYDTRAATLAKHTLTGQMLAGQQLDVHFSLPKDDREAAQGTLLVASLDAGSSRQELLYLFSQYGELRDVADDPLGRPNCCLVEFYDTRHAAAALQGISQAPDMASRLVVMDPSAAAVLPQAGPGAPSAAAAQLSTSLSHDYLAAMPSGGQPGSQYGGGMRNVGSSPALLYGGGTHGSSSQLDYLLAGGGGAALHMHQQQAAAAAAAQQGGGGGAGSFDPTAQLLSGLAAADPLAGMNRSFSEMSLESSSGALGGRFAPNSMSTGDLLAMTQGLQGAGSSALRGIASTGSMWPHHQHHASLGSSPVGTGAWPAALVGGSHGSLQDLLQKQAAVNAALQQQAAAVNAAALMQQPNQLVQNAALQAAMQQALLTQQAAALLGHGGLQGAGLLGGGGRRGVEPPLGGRLARRPLDPVAEAERRMQQEKLYSLDLNKIRAGEDKRTTLMVKNIPNKYTQKMLLALVEERFRGMFDFFYLPIDFKNKCNVGYAFINMVRPEYIVPLVEELHGKKWPKFNSEKICHIAYGRIQGKAALVQHFQNSSLLHEDKRCRPILFHTNGTLAGEVEQFPGTLSSPIVPAAAAGATSVPAMAAAAASVAAVAVHGTAAPQVGQSGSAVVLEPDRGV

SEQ ID NO: 360 - DNA, 1926 bp, Ostreococcus taurii
atgtccaagctcgacgacgaaagagcgatcttgggagtcgaggacgtggagatgcgacgttcgagggcgtcggcgagtggagagatggatgcgttagagtcggagttggagcgatcggcgaggatatcgaccacgtcaagcgcggcggaggagggactttgggaggagaagcccgggaagttggtgccggcgggtaaaggcgcggagtcgtcgggcgatcgacgtgggaacgtgagcgggatgcgatctggaatgcgagcagtcgctacgggaaataatgcgggagatgtgaagcgtggcgagaacgtgcgccgcggcgccgtcgcggaagcattggcgcgtgacgctccgcggcagccagctggcccgccgccgccgcgaaaccttccgtcgacgctcatggggacggagcatcagctctcgcaagcgcatcagcagtacatgatgaacatgcaaatgtccgccatgcatcagggacagatgggtgcaccgattcagccagaatcgcccatgtcgcccatgtcaatgccggcagtgtggaccaacgacgatccgtctcggacggtttatctcgttctggtcgacgcgtccatgaacgaccagatgttgtggtcgatcgcctcgcagttcggagatattcgttcaatcgcgaacgagctgcgacgaacgatgaacaccgtgttcgtgtcttactacgatattcgagccgccgagctcgcaaagttgacgctacaaatgtccacgcacatattccacatggtggcctactccggggcgtgtgattggatccctgggatggagaaccaaggccgcttcctggcgtacgatatcggcacggccgaagaagagcgcgacgcggagtttcgagcgttgttggattcgtttggtgaggtcaagcggttgatgacgccaaggggccacgaaaatcatagattcatagagtactttgacgtgaggcacgcgcacacggcggtgacagaactgcagcagagcgggttcaggagtaagcccctttcagtggactttcactcgcagtcttacgctgcggacttccaccagcaacacgcgttctctccgccctcgccgtcctccatacatcagtacatggggcaggccgcgatgatggcaaacatgtactggccatacggcggtccggtcacgacgatgcccatggttggcgcgcaagggtatggtggttatcaaggatggtcgccggatcagcagcactacggttaccctgtacagagtgcgagtggccacggttaccctgtacaaagtgcgagtggccacggcgggcatcgctcgccccgttcaagcggcgagtattcgcgatcgccgcgaacgagtgaaagtatgggccgatctagatcgagtcacaatagtactttagaggcgtttcagaggacgaatccggaagagttcatcttcagtatggaagaagcgaacgaggcggggacgaaggataatccagagcacggaaggaccacgctcatgattcgcaacatcccgaacaagtacaatcaagctatgctgttggatctcctcaatcgatcttacgagaaccagtacgacttcttctacttgcccatagacttcaaaaacaaatgcaacttgggctacgcttttgtgaacttcaagtgcgccaagacgacggcggcattttataaggagttccacaagcagcgctgggaagaattcaactcccggaaagtgtgcgagatcacttacgctcgggtccaaggcaaggaggccatggttgagcacttcaagaacagtcgatttccgtgtgagaacgaagagttcttgccgctggtcttcgataccgacgggaacaaaactagctaccatactttaggacacaccgtacatggagcgactggaaggtttccagacacggcgagcgagaacgtaaccgacagtgtttaa

SEQ ID NO: 361 - protein, 641 aa, Ostreococcus taurii
MSKLDDERAILGVEDVEMRRSRASASGEMDALESELERSARISTTSSAAEEGLWEEKPGKLVPAGKGAESSGDRRGNVSGMRSGMRAVATGNNAGDVKRGENVRRGAVAEALARDAPRQPAGPPPPRNLPSTLMGTEHQLSQAHQQYMMNMQMSAMHQGQMGAPIQPESPMSPMSMPAVWTNDDPSRTVYLVLVDASMNDQMLWSIASQFGDIRSIANELRRTMNTVFVSYYDIRAAELAKLTLQMSTHIFHMVAYSGACDWIPGMENQGRFLAYDIGTAEEERDAEFRALLDSFGEVKRLMTPRGHENHRFIEYFDVRHAHTAVTELQQSGFRSKPLSVDFHSQSYAADFHQQHAFSPPSPSSIHQYMGQAAMMANMYWPYGGPVTTMPMVGAQGYGGYQGWSPDQQHYGYPVQSASGHGYPVQSASGHGGHRSPRSSGEYSRSPRTSESMGRSRSSHNSTLEAFQRTNPEEFIFSMEEANEAGTKDNPEHGRTTLMIRNIPNKYNQAMLLDLLNRSYENQYDFFYLPIDFKNKCNLGYAFVNFKCAKTTAAFYKEFHKQRWEEFNSRKVCEITYARVQGKEAMVEHFKNSRFPCENEEFLPLVFDTDGNKTSYHTLGHTVHGATGRFPDTASENVTDSV

SEQ ID NO: 362 - DNA, 1737 bp, Selaginella moellendorffii
atgatgatcttcgctccgccgatcgttgatcctgctccggctcaatggatcaaaatcttcccgcgcttcctccccgcgccgatcttgtccaagctcaatcccgatgctcgggagtttcagccgctggaagaatcgatcgctcctctcccggcattctcttctcctcttgctcctccgcatcgtcggcacgagtttagtctcgtgcaagaatcctccgacgaggatgagaatcgcctcgagcagcaagaaagtggagaggaatccgagacatcggctcaagaagattgcgatcgaggaggagaagaagaagaagaaggcatggcacagtatttcttctatccctcgccgatcttcgattcgatctccaacgtccgccacatcgccccatcctccatcgctcgcgagcactcctcccgctcgctcatcctcggcaatatcccctatccgatcgatcccggccagctccagtcccagctcgagcagtggggcgcgctgcgctacatctccttcgccgccatggcggagcgcggcattgtgatcgcccactactgcgacgtccgccacgccgcccaggcgctcaaggacatccacgcgcagcacctcatccagcagcacaaattcctgctgctccgccggatggatcacttccagagggcctggcgtcacgctgcccgagaggacgccaagagcgccgcgcggcgccagatcgaggtgacgcgggcggcactgcgcgccgccggcgagaagctgcgccgcgagcggggcctcgtttgcggcgccgcgctgtgggccaaattcgtgccgctgtgctgctgcgtgagcgagaaggaggagtttccagagatggagaatcaaggcacgctcgtcgtcttcaacctggatgtcgcgatctccatcgagaccatcaacagtgtcttcaagaaatacggtgatgtgaaggagatccgagagactccgatcaagcgaacgcacaagttcgtcgagttcttcgacgtgcgcgacgccgctcgagcgaaagaggcgctggatggcgaggacattctcggcagcactgtcaagatcgagtttagtcgccccggtgggatgctccagaggcacagcgagcaccattccatcctcgacttgtacccggcggtggcgtttgagagcttccagcgcgcggtggagtggaaggcccctcctcctccagcagcggcgccgctctttactccgcctggtttctacgccggcgttcctccggctataagcacgtaccaagcctggcaagctcctttgtggagtttctccggtgctcgtgggaatccgaaggaaaggagaagaatgctcgaggattgctcgtacaaattcgacgaggagttgaaggacgagaggacgactctcatgatcaagaatcttcccaacaaatacagtcaggagaagctcatggacaagatagatggtcattgcgctcaatgcaatgcgcatatcgacagttctgaggatgtttccgcgtacgatttcttgtaccttccgatcgatcccaggaaccagtgtaaccttggttacgcatttgtcaacttcgtctcggtcgcggcctgcgggaggttttacaaagcgttccacaacctgcaatgggaagcacacaactcgaggaagatctgccagataacttacgctcgaattcagattataggacctccaaaatttgtcgaagtactaagacgtgacacgttcgaatctctgccccagcatgtctaa

SEQ ID NO: 363 - protein, 578 aa, Selaginella moellendorffii
MMIFAPPIVDPAPAQWIKIFPRFLPAPILSKLNPDAREFQPLEESIAPLPAFSSPLAPPHRRHEFSLVQESSDEDENRLEQQESGEESETSAQEDCDRGGEEEEEGMAQYFFYPSPIFDSISNVRHIAPSSIAREHSSRSLILGNIPYPIDPGQLQSQLEQWGALRYISFAAMAERGIVIAHYCDVRHAAQALKDIHAQHLIQQHKFLLLRRMDHFQRAWRHAAREDAKSAARRQIEVTRAALRAAGEKLRRERGLVCGAALWAKFVPLCCCVSEKEEFPEMENQGTLVVFNLDVAISIETINSVFKKYGDVKEIRETPIKRTHKFVEFFDVRDAARAKEALDGEDILGSTVKIEFSRPGGMLQRHSEHHSILDLYPAVAFESFQRAVEWKAPPPPAAAPLFTPPGFYAGVPPAISTYQAWQAPLWSFSGARGNPKERRRMLEDCSYKFDEELKDERTTLMIKNLPNKYSQEKLMDKIDGHCAQCNAHIDSSEDVSAYDFLYLPIDPRNQCNLGYAFVNFVSVAACGRFYKAFHNLQWEAHNSRKICQITYARIQIIGPPKFVEVLRRDTFESLPQHV

SEQ ID NO: 364 - DNA, 2674 bp, Selaginella moellendorffii
atggggtcgggaaacacgtttcacagcggtgctacgtcggctgctccatccatttccatggcgttttctgagagcgggggctggtcttggttccgtggggggcctgcaaagggagacgagttgccaccggaggatcactggtccgaggacaaggagaagagcgcgagctgggcggtaagcgatgacgtgcccgagcaccggagcgtgccatccggtcttgcttccccacagatgacacaggaagccgccgttgccgccgccgccgccgtcgacaaggcaggtgacaacattggcgtgaacattttctcgagttcattgcctgacttgttccgaaacaaactaggactgctcgatgttcaacagccgccctcatcggaggccgacgaggaacctgaagacaatgagattcctctggaagaactggagctgcatgctatcggcagtctgcttcctgacgacgacgagttgttggccggtgctctcactgatatgccaccggggtcgtccagcacccaggattcagaggatctcgactttttcagcaacggagggggccttgaactcgacggtgatggcttttctgccgaagaaccgacttcgcgcacgatttttgtacggaatatagatagtaaagtttcggatgacgagcttagagctgtttttgagcgttttggtgacattcgtacgctgtacactggatgtaaacccgaaggtttgattttagtctcctactacgatttgcggggtgccaagcgcgcgatacgtgcgctccagagccgggtgctgtggggccaaaagttggagatgcacttcttatttccaaaggatagtcacccatacgacacaagccttggcatggttgcggttttcaatgtcgatcccgccgtgtcaaacgacgatctcaaagaacttttcggagtgtatggggacatcaaggaggtccacgagacgccgcttaaacatcgacacaggttcatcgagttctatgattcacgagctgcatgcgctgcgcttcgggttctgaataagcgtgatctactcgccaggcgaactcgactggacccgagctcaatattgcagttcaacgatgacgttgataacgatgatcctctcgtgcagtctcagcatctgttcaatgcgacaggctatagtgaaagcgaggctttgagggagcttcaccagcaggcgaagtttgcgtcgtttagccacccttggaactccctggcgggtggtttatcttcaccatcctccgtcatgggaaaagctggtgatgttgggctgggctatcactcgtatccggattttgattacggccttatgaaccatattcggcagagctcggccatgtcagctttacgtgcacgtgaaggactggaagagatgcctcttcataggagtcctggttacgagcatagaggcctggcagtaaatcctcgaccaggattggtgacaacgccaagctcgcctttcctgtggggcaatgctccgcagagctctccgttgctgtggccaccatcagctcatttgtatggtcatccaaaggttcatggttgcagcctgcagagccacttactcaatccggtcctggcttaccctcaagtaggatgcctaccttacggtgagaagttacgagacagaaggcgcgggtatttaaggcaatcggcgcctggaggatacctcgggcttacagggtcactgaggctggggtcaagaagtcatcctgatcgcaagagtgatttgtcgaagggcgctctttccagcggcgtgggccgattcaacagccggcacagaagccgcagaggcgacagtaacgcagcggacaaagaacagtttcacctggacctggatcgtatagtcagcggagaggacaagcgtacgacgctcatgcttaaaaatattccgaacaaatacacgtcgaagatgctcttggcagtgatcgatgaggcaaaccagggcacttacgattttatctacttaccaatcgacttcaagaacaagtgcaatgtggggtacgcttttgtgaatatgatagagccttcctacattgtctcgttttataaggcttttaatggcaagaaatgggaaaagtttaatagtgagaaggttgcatcggtagcttatgctcgaattcaaggcaaagccgctcttgtggctcatttccagaactcgagcctgatgaacgaatgtcgtcctatagtgttcggcgaagaagggaacactccggacgatccaggcaaagaaatcgggattgtaatgggttccgaggaagcgacgaaactgtaaaacacgtgagggtaacacagagaggcaaggaagatgatgagcacctcttcaagcgaaggttttgatgtagattccttaggactggctcatccatctatcgttgaggttccagtttttttcctttcgtttttcttttttatctttttctacgttcttccttttgcttgtaaaaaataatgagctagtcatggaagaagatccggcagccgcggtagcagcagcagattttatgtaaaaagatcagaagaagaaagtttggtgttcggcaatcagtggcagtgttgatctccgttagttggttggattggagagggagagagtttttcaggcctttggtggtggctctacctttgtagctccatcagattttgtagtaatggtttctttcgtt

SEQ ID NO: 365 - protein, 760 aa, Selaginella moellendorffii
MGSGNTFHSGATSAAPSISMAFSESGGWSWFRGGPAKGDELPPEDHWSEDKEKSASWAVSDDVPEHRSVPSGLASPQMTQEAAVAAAAAVDKAGDNIGVNIFSSSLPDLFRNKLGLLDVQQPPSSEADEEPEDNEIPLEELELHAIGSLLPDDDELLAGALTDMPPGSSSTQDSEDLDFFSNGGGLELDGDGFSAEEPTSRTIFVRNIDSKVSDDELRAVFERFGDIRTLYTGCKPEGLILVSYYDLRGAKRAIRALQSRVLWGQKLEMHFLFPKDSHPYDTSLGMVAVFNVDPAVSNDDLKELFGVYGDIKEVHETPLKHRHRFIEFYDSRAACAALRVLNKRDLLARRTRLDPSSILQFNDDVDNDDPLVQSQHLFNATGYSESEALRELHQQAKFASFSHPWNSLAGGLSSPSSVMGKAGDVGLGYHSYPDFDYGLMNHIRQSSAMSALRAREGLEEMPLHRSPGYEHRGLAVNPRPGLVTTPSSPFLWGNAPQSSPLLWPPSAHLYGHPKVHGCSLQSHLLNPVLAYPQVGCLPYGEKLRDRRRGYLRQSAPGGYLGLTGSLRLGSRSHPDRKSDLSKGALSSGVGRFNSRHRSRRGDSNAADKEQFHLDLDRIVSGEDKRTTLMLKNIPNKYTSKMLLAVIDEANQGTYDFIYLPIDFKNKCNVGYAFVNMIEPSYIVSFYKAFNGKKWEKFNSEKVASVAYARIQGKAALVAHFQNSSLMNECRPIVFGEEGNTPDDPGKEIGIVMGSEEATKL

SEQ ID NO: 366 - DNA, 1593 bp, Selaginella moellendorffii
atgcatggcgctccatcgcgggcattgcttgtctctgggatcccgcagcacatcgtcgaccctctggtgatgcaagatctggaatcttggggtcccattcgatctttcttcctcggcgctcgagcgcaaggctgtattacggtctactactacgatcttcgccacgcgcaggacgcgcttctctccatccggtcgcagtacttcttccagcacgatctcagctacagcgagggacgcggattgatcggcggatacccagcatgggcggagttcgtcactatctctccctcgtatcccttgatcgattcgcccaaccaggggaccttggtcgtgttctatctccggatgaacattactcacgccgaactcgcaagtatcttcaagcaatacggtgacgtgagagaaatccgcgaagcccccagcaggaggagcagattcgtggagttttacgacatacgggacgctgcccgggccaaggaagctctggacggggtcgaggtattgggacggcggattaagatcgaatttagcaggccgtgtcaaccaaggaactcctacaacaccaccccggccttatatccttccttcgtcccgtactaccccgtacctcgtggatatggtcgggctggaccagcggcggcctcggtcaccaccaggcggcgctttgagatcagcgcttacaatcagcagcaggcagcgtcggtcagaacccgggacgagagcgctgccagtgccagtggcaaccttggcgatggcagaggctgcattgtcagcttttcttcggagcgcatctacgaagaatccaagtggactggtaggaagcacagggtggtgagaaggatcgcaagggacgagtctcagtacgttttcaacacgggggaggacgaggaaagcggacgtaccacgctgatgatcaggaacattcccaataaatacagcctccgcatagtgattcgggtgctggaccagcactgtatcacctacaacaatggcctgggagaggacgaaaaggtttctgcttacgactttgtttatctccctgtggatttcatgaacagatccaaccttggatacgccttcgttaatttcaccacggtggtggcaaccaaaaggctgcacaaagacttccacggccgacgctgggaggaattcaagtcccggaaagtctgtcaggttgcttatgcccggctccaggcgaaacaactagaggagcacttcaagaactcccgatttgcctgtgacaccgacgagtacttgccgctggtgtttagtcctccaaggacgggcttgcagtgttcttcgccaacggtggtgtcctccttggccgcgagaaaggccgggggcaagcgtctggagattaagtcactcgataatgcattgccgactccagatccatcgcaggaggcgaccgaagcgccacagacaagcattgatctcgagtcgggatccgagcagccgtgggagggcgatcagattgacgacgacgacgacgagaactttgagtctgaggatctggaagaagagctggacgaagacgatgacgatggtggatcctcgcaggataatgacgaagatggagaaggcaaccagtga

SEQ ID NO: 367 - protein, 530 aa, Selaginella moellendorffii
MHGAPSRALLVSGIPQHIVDPLVMQDLESWGPIRSFFLGARAQGCITVYYYDLRHAQDALLSIRSQYFFQHDLSYSEGRGLIGGYPAWAEFVTISPSYPLIDSPNQGTLVVFYLRMNITHAELASIFKQYGDVREIREAPSRRSRFVEFYDIRDAARAKEALDGVEVLGRRIKIEFSRPCQPRNSYNTTPALYPSFVPYYPVPRGYGRAGPAAASVTTRRRFEISAYNQQQAASVRTRDESAASASGNLGDGRGCIVSFSSERIYEESKWTGRKHRVVRRIARDESQYVFNTGEDEESGRTTLMIRNIPNKYSLRIVIRVLDQHCITYNNGLGEDEKVSAYDFVYLPVDFMNRSNLGYAFVNFTTVVATKRLHKDFHGRRWEEFKSRKVCQVAYARLQAKQLEEHFKNSRFACDTDEYLPLVFSPPRTGLQCSSPTVVSSLAARKAGGKRLEIKSLDNALPTPDPSQEATEAPQTSIDLESGSEQPWEGDQIDDDDDENFESEDLEEELDEDDDDGGSSQDNDEDGEGNQ

SEQ ID NO: 368 - DNA, 4896 bp, Volvox carteri
atgatcatccgtgcgctggagaagcagggtaatcgacggcggcctggtgccggagtggacgacccctatgcggaagagcgttttctggcggcacagtcccacctgcacctaaacggccgtggcatcactcgcattgccagcctacggccaatgaccaccttggaggtactgtacttatacgacaaccaaatcagcgtcattgagaacgtgtctcacctgcgccgcttgacgcacctctacctggccaacaactgcgttcgggaaatcagcgggctggcggggctcagcagccttcagaagctctacatagaggacaactgcgtgcaggtggtttcggggctagaggcctgtccttccctggaggagctccacgtctcttcacaacgtcttccccccggtacccccctcacctttgacccggccaccgtagctgcactagcacccagcttgcgtgtgttgaccgccgcgcactgcggcatcaccgccgcatccctgcatcagctagaggggctgacccgcctgcgtcgcctggacctgtcgcacaacaccatagacgctttcgagccaattgacgctgtcatacagccgtgtgccgtactgtcctccctggacctacggggcaatccggtgtgtaagctgcccaagtaccgggacacggtcatcctcatgaacgacagtgtgtcgacgctggatgatgaggcgatccccgctcagcaccgggagttcctcctacgactgcacatccgccgaatgaaggcgcaactcgcggcggagctgaaagaagacgcgacagcagcggcaggccagccacagccacaagctcccggcgaccagtacggacagggggctggcgccgctgcgaagtggcatgaatcacgaacgcagaggcgtgcgaaacgaaggggcctcacggggaagctgcacggcttcaagaggacgaggcggttaacgcagagctccggtagcaggctgatctttggatcggctgcctgccttgcagctatcgggaagatgacgcgccagcatgacaatggctcagcagcgccttgcgcaggcgtggcttcggaagctggcagcctccagcaacagtctagtatgctcaagaatgcatcagatccaagcttacggtcaacaggcagcagctttgccgacttggaatcagcagggtatgcaaggcatggcatacatcgccaagaagatcctgacatcttcagcgcggttggcggtatggaactgggcgcggacggcgacttggagtcactgggcgtggatttcgcttcgaccagtgggcatgagccgctcgcggaaccgtctcgcacggtatttgtgaggcatactaatccagctgctggcgacgaggagttgttggcagtgtttaaggtgttcggcgacgtcgggcacatgtacaccattagcaaacaccgtggcttcgtgatggtgacgtatttcgacttgaggaacgccatgcgggcccaggcgacactgaacggctctcacattaacggtatcagccttggtagcacatccctggaggtgcacttctgtgctcccaaaggggacccgaccataaaccagggtacggtcaccgtgttcaacctcgatccggataccacaaacgagcatttggtctggctgttctctaaattcggtgacgttaaggacattcgtgagtcgcctgaccgtagcaaccaaaagttcattactttctacgacacgcggcatgcgctggaggccttgcgcctaatgaacaaggccgaacaccttggcaagctcccttcgaacatcactcctcagctggcggcgtctttatcacagcataccatgcatggggcgtctgcaggattcgagggtgttcagcgatcgcagttcctaagcggacaggcgggaagtgcagggatgtgggactcacagcactcaccggagctgctgcaggcgcagctggctgcagcaaggcagtccgcatcacgcgcatcatcccagcccggtacatcgtcccccagccctctacctggcacatcacctgcgggaccggcgttccttgcaccagcgcggcaagacttgcaggtgccgccttctgtcacgctgaaccttcagcaacagcagcagccagggcaggctgtccaaggcattgtcggcagtcagcagcaggctgtggagcaaatggcggctggagtgcggccgggcctgcatgtgtcggactcagcgtccagcatgtcatcggtggcggggcaggccgctaaccagttatttgcggcagcagccgcggccggtcgcagccctctcgggggaggggccataattggcacccacggtcatggaacccatggcggccacgtgtcaaaggctgttccttcgcttgctactctttcagaggcgcaggcgctggaggaacaggccgggctgtatgcggcggctgggtcaatgctggcggggaccggtggccagagtgggatagagcagaccggtggcagcaatgctgctaacgtgaatgcaactgccaatatgctaatggggttgcagcttggacaggaccaacagctttgggcgttgcagcaacagatggctggtgcggcgcagggccaggcggtaacggcggcatctggacaagcaggcctgtgggcggctgctgctgctgctgctgccgccgcggggtcgctgtacggtccttctgcccagcagcaggctgcggcagctgctgtgaacctgcaaacactgcgcaatctgcaggaacttcaggctcgtcagcaggcgcagcagcagcaggtggcaatggccaccaacctggcattgttgcagggccaaacgctgtcggctgccgacctgaacgcggctgcggcgcacctgctacacatcgccggcttgggaaatgcgctggggcaatccccttcggctgcagcatcgctgttgcccgctgcggcggggctgggcatgggcagcctcggcggcctcgctggaagcgctagcagtctcagcggcttgagcagtgcagctgctacgcagcagctgctgcagaacgccatggccatgagcaacatgggtgtgctgggcgcgcttggcacgatgcaggccgcgatgggaggtcagcctggaacaagtcgactgagcggctcatttgggtccctcacgggcgcgttggctggatcgcaggccggcagcagcggccatcacaacagcaatggtgctcgtgacggcgccggaggcaaccgcggcggcggccggttaagtcgtcgcaccacggacccggccgccgagctggagcgcaagttgcagcaggagaagctgtatgcgttggaccctgttaagatccgcagcggagaggataagcgtacaacgcttatgataaagaacattcccaacaagtacacccaaaagatgctgctcgcgacaatggacgagcagttcaagggctcttatgactttttctacctccccatcgattttaagaacaaatgcaacgtgggctatgccttcatcaatatgatcaatccctacgacatcattgccctcgtggagcgattcaacaaccggcgctgggagcgattcaacagcgagaaggtctgcagcatcagctacgctcgcatccagggccgcgccgcacttgtcgcgcactttcagaattcaagcctgatgcacgaggacaaacgctgccggcccatcctttttactgcgaacggcaccgagaccacagacccggaggctttccagaacgacccttcactgcagcccgtgcccactgcagcaagcggcgcggccatgtcgcagtcaggcaatcagcaaaccgcggcgttgggtggaggcggagctctaaacgtcgcaccgtcagggcggtgcgagcagcgcgacgacaaaatgtttttcgtattaactgtagaacagccgagcgccgcggtcgtgcggattcttggggtgaaatgtggggttttccgtggtcaaagccccatcatgccgggcatcgtctctctgcctcggaaagtgattggcacagcgctgagcctgaccggcaaggccgttgctggtgcagctacttccagctacgtgaaggacctggtttcttcgtttgcggacaaggccattgtgagcgagtcgctggccaaggttgaggacgtggatattccgttctgggcttactggctgagcatcgggggctatagcagcccagctggctacaagaagtttgcagatgcggctaagagcaaagtccttggcatggagccgcagcaggtcactgacctggtcgtggcgttccacaaggtgaactactacgataaggatctgtgcacgggtgtcgctgcgaacatatctgccaacttcacgaagtatgagacggagcagctcttaaaggtgctgggggcgttcctggaattcgggttctatgacctggcagcatatgacgacatcgcggactccatcacgtactgcaaccactacctggcacccattaaggcttcgcctgtagagctggccaacgcgttcgctgcatatcagaagttcgagcacgagcgcggtgatcttttccttgctctggcaaggggcttcaatgaggcgtcgcttacgaagctggatgctgattcccgcaaggcagtggtgcttaaggcactgcgcgccttccacgccttccagttctggccggaggccaccgaggctttgctgtacgccgccaagaactcgccggcgtcttacagtgccgacgagatgaaggaggtggagaaataccaggcgttgctggaggacgcgcagggcggcgagctgcgtgtgttcaaagagggcgacgacgtggactcggtgcattggtacggccaccacacttcagcaccgtcgtcgtaccagttgtacgttttccgtgactcgttggtcccgaagcagtactcgcctgccggcatgcggcctctcaagtga

SEQ ID NO: 369 - protein, 1631 aa, Volvox carteri
MIIRALEKQGNRRRPGAGVDDPYAEERFLAAQSHLHLNGRGITRIASLRPMTTLEVLYLYDNQISVIENVSHLRRLTHLYLANNCVREISGLAGLSSLQKLYIEDNCVQVVSGLEACPSLEELHVSSQRLPPGTPLTFDPATVAALAPSLRVLTAAHCGITAASLHQLEGLTRLRRLDLSHNTIDAFEPIDAVIQPCAVLSSLDLRGNPVCKLPKYRDTVILMNDSVSTLDDEAIPAQHREFLLRLHIRRMKAQLAAELKEDATAAAGQPQPQAPGDQYGQGAGAAAKWHESRTQRRAKRRGLTGKLHGFKRTRRLTQSSGSRLIFGSAACLAAIGKMTRQHDNGSAAPCAGVASEAGSLQQQSSMLKNASDPSLRSTGSSFADLESAGYARHGIHRQEDPDIFSAVGGMELGADGDLESLGVDFASTSGHEPLAEPSRTVFVRHTNPAAGDEELLAVFKVFGDVGHMYTISKHRGFVMVTYFDLRNAMRAQATLNGSHINGISLGSTSLEVHFCAPKGDPTINQGTVTVFNLDPDTTNEHLVWLFSKFGDVKDIRESPDRSNQKFITFYDTRHALEALRLMNKAEHLGKLPSNITPQLAASLSQHTMHGASAGFEGVQRSQFLSGQAGSAGMWDSQHSPELLQAQLAAARQSASRASSQPGTSSPSPLPGTSPAGPAFLAPARQDLQVPPSVTLNLQQQQQPGQAVQGIVGSQQQAVEQMAAGVRPGLHVSDSASSMSSVAGQAANQLFAAAAAAGRSPLGGGAIIGTHGHGTHGGHVSKAVPSLATLSEAQALEEQAGLYAAAGSMLAGTGGQSGIEQTGGSNAANVNATANMLMGLQLGQDQQLWALQQQMAGAAQGQAVTAASGQAGLWAAAAAAAAAAGSLYGPSAQQQAAAAAVNLQTLRNLQELQARQQAQQQQVAMATNLALLQGQTLSAADLNAAAAHLLHIAGLGNALGQSPSAAASLLPAAAGLGMGSLGGLAGSASSLSGLSSAAATQQLLQNAMAMSNMGVLGALGTMQAAMGGQPGTSRLSGSFGSLTGALAGSQAGSSGHHNSNGARDGAGGNRGGGRLSRRTTDPAAELERKLQQEKLYALDPVKIRSGEDKRTTLMIKNIPNKYTQKMLLATMDEQFKGSYDFFYLPIDFKNKCNVGYAFINMINPYDIIALVERFNNRRWERFNSEKVCSISYARIQGRAALVAHFQNSSLMHEDKRCRPILFTANGTETTDPEAFQNDPSLQPVPTAASGAAMSQSGNQQTAALGGGGALNVAPSGRCEQRDDKMFFVLTVEQPSAAVVRILGVKCGVFRGQSPIMPGIVSLPRKVIGTALSLTGKAVAGAATSSYVKDLVSSFADKAIVSESLAKVEDVDIPFWAYWLSIGGYSSPAGYKKFADAAKSKVLGMEPQQVTDLVVAFHKVNYYDKDLCTGVAANISANFTKYETEQLLKVLGAFLEFGFYDLAAYDDIADSITYCNHYLAPIKASPVELANAFAAYQKFEHERGDLFLALARGFNEASLTKLDADSRKAVVLKALRAFHAFQFWPEATEALLYAAKNSPASYSADEMKEVEKYQALLEDAQGGELRVFKEGDDVDSVHWYGHHTSAPSSYQLYVFRDSLVPKQYSPAGMRPLK

SEQ ID NO: 370 - DNA, 2194 bp, Oryza sativa; identical to SEQ ID NO: 154

SEQ ID NO: 371 - DNA, 56 bp, Artificial sequence
  primer: prm12472
ggggacaagtttgtacaaaaaagcaggcttaaacaatgaatggaaaggaaatttac

SEQ ID NO: 372 - DNA, 50 bp, Artificial sequence
  primer: prm12473
ggggaccactttgtacaagaaagctgggtactcctatcgtctagttgctg

SEQ ID NO: 373 - protein, 179 aa, Populus trichocarpa
MWMMGYNDSGDFDMPDSFNDRKLKTLVPRPLPSTNNTSTASGHPCPGSRLHSTDFLALNQYHLGLASMVDQGIREFNTQPVVMSSRWNPTPEQLRTLEELYRRGTRTPSTDQIQDITAQLRRYGRIEGKNVFYWFQNHKARERQKRRRQMESDSLDDHQQNGHGVEMFERKEPGKKTPI

SEQ ID NO: 374 - DNA, 1235 bp, Populus trichocarpa
tatttgtccttcaagcttgtttatacgaaaatgtggatgatgggttataatgatggtggtgaattcaacatatcagattctttcaatggcaggaagcttaggccactagttccaaggccaataccctctacaaacaacactccaactgcctctagtcctccttgccttggcagtcgccttcataacaccgatttctttgcactcaatcagtatcatctggcaagtatggctgatcaaaacaaaagagaattcaacacacagccagttgtaatgagctcaagatggaatccaacaccggagcagttaaggacccttgaagatttgtatcgaagagggactagaacaccctcaactgaccaaattcaagacataaccgcacagcttcgtagatatggaaggattgaaggaaagaatgtgttttactggtttcaaaaccacaaggcaagagaaaggcaaaagcgtcgacgtcaaatggaatctgattcttttgatggtcatctgcaaaatggacatggtattgaaatctttgaaaggaaagaatcagaggcaagtaggacaggttatgaaggtgaacaaaccaagaactgggctccctctacaaactgcagtacactatcagaggaatctgtttcaatatcaagggcaacaaaaggagcaatggcagagtactgtagaccagatggatggatgcaactcgatgaaggagaattacagcatagaaggaactttatagaaaggaatgccacgtgggagatgatgcagttgtcttgtccatctcccacccaccaaagaaacactatctctagtactagtagcactacaactatgtcaaaacaaggagcagcagcagcgaagctcattaaggctcatgacctcaacgtctttatagcaccttacagagaaaatgggcatcatggagcccttattaaccagttcaatagcagtgtcatcaatgacggggatgaatccagaggtggtactggggaatctcaaacccttcaactgtttcctcttcgtagtggcggtgacggcaacaataatatcgaaagcattaacgagagagagagtgaggtatcagtttctgctgctgaagctttgaatgctaataacttcgctccttgccagttctttgagttccttccactgaagcactaatgatgaccatccaaagcaagactcttcttcttttgtttcattttatgagtactttgccatgtatgtaacatgatggggtt

SEQ ID NO: 375 - DNA, 850 bp, Arabidopsis thaliana
catgcaaaccatcgtcttaaaaccctagttctccataaaaaaaatatccttgaacacaaataaatggaaaacgaagtaaacgcaggaacagcaagcagttcaagatggaacccaacgaaagatcagatcacgctactggaaaatctttacaaggaaggaatacgaactccgagcgccgatcagattcagcagatcaccggtaggcttcgtgcgtacggccatatcgaaggtaaaaacgtcttttactggttccagaaccataaggctaggcaacgccaaaagcagaaacaggagcgcatggcttacttcaatcgcctcctccacaaaacctcccgtttcttctacccccctccttgctcaaacgtgggttgtgtcagtccgtactatttacagcaagcaagtgatcatcatatgaatcaacatggaagtgtatacacaaacgatcttcttcacagaaacaatgtgatgattccaagtggtggctacgagaaacggacagtcacacaacatcagaaacaactttcagacataagaacaacagcagccacaagaatgccaatttctccgagttcactcagatttgacagatttgccctccgtgataactgttatgccggtgaggacattaacgtcaattccagtggacggaaaacactccctctttttcctcttcagcctttgaatgcaagtaatgctgatggtatgggaagttccagttttgcccttggtagtgattctccggtggattgttctagcgatggagccggccgagagcagccgtttattgatttcttttctggtggttctacttctactcgtttcgatagtaatggtaatgggttgtaacgaa

SEQ ID NO: 376 - protein, 260 aa, Arabidopsis thaliana
MENEVNAGTASSSRWNPTKDQITLLENLYKEGIRTPSADQIQQITGRLRAYGHIEGKNVFYWFQNHKARQRQKQKQERMAYFNRLLHKTSRFFYPPPCSNVGCVSPYYLQQASDHHMNQHGSVYTNDLLHRNNVMIPSGGYEKRTVTQHQKQLSDIRTTAATRMPISPSSLRFDRFALRDNCYAGEDINVNSSGRKTLPLFPLQPLNASNADGMGSSSFALGSDSPVDCSSDGAGREQPFIDFFSGGSTSTRFDSNGNGL

SEQ ID NO: 377 - DNA, 1160 bp, Arabidopsis thaliana
aaacaaagccctaatatttttacttgctatatcgctgtctctctcccttctcctctataaacatacatataaattaagtacacaccaaaatgtggacgatgggttacaacgaaggaggcgcagattccttcaacggaggaagaaagcttcgtcctctcatcccacgtctcacttcttgccccaccgccgccgtaaacaccaactccgaccaccgctttaatatggcagtggtgacgatgacggcggagcagaacaagagggagctgatgatgctaaactcagaacctcaacatccaccggtaatggtgagctcacggtggaatccgacaccagatcagttaagggttcttgaagagctttaccgacaaggaactagaactccttctgccgaccacatccaacaaatcaccgcacagctacgacggtacgggaagatagaaggcaaaaacgttttctattggttccaaaaccacaaagcccgagaacgccagaaacgacggcgacaaatggaaactggccacgaagaaacggtcctttcaacagcaagtcttgtctcaaaccacggattcgacaagaaagatcctccaggttacaaggttgaacaggtcaagaactggatatgttcggtcggatgcgacacgcaaccagagaaaccttcccgtgattatcatctggaggagccagcgaatatacgggtggagcacaatgctcgttgtggaggagacgagagacgaagctttttagggataaacaccacgtggcagatgatgcagttgccacctagtttctactcttcttcacatcatcatcatcaacgtaacctcattctcaattcacctactgtttcctccaacatgtccaacagcaacaatgctgtctctgcttctaaagatacggtcacggtttcacctgtatttctacgtacgagagaagcaacgaacacagagacttgtcatcgaaatggtgatgataataaagatcaagaacaacatgaagattgctccaacggtgaattggatcatcaagaacagacacttgagctgtttccactgagaaaagaagggttttgtagcgatggtgagaaagacaagaacattagtggcattcactgtttctatgagtttctgccattgaagaactaaacctaattgaagtctttc

SEQ ID NO: 378 - protein, 350 aa, Arabidopsis thaliana
MWTMGYNEGGADSFNGGRKLRPLIPRLTSCPTAAVNTNSDHRFNMAVVTMTAEQNKRELMMLNSEPQHPPVMVSSRWNPTPDQLRVLEELYRQGTRTPSADHIQQITAQLRRYGKIEGKNVFYWFQNHKARERQKRRRQMETGHEETVLSTASLVSNHGFDKKDPPGYKVEQVKNWICSVGCDTQPEKPSRDYHLEEPANIRVEHNARCGGDERRSFLGINTTWQMMQLPPSFYSSSHHHHQRNLILNSPTVSSNMSNSNNAVSASKDTVTVSPVFLRTREATNTETCHRNGDDNKDQEQHEDCSNGELDHQEQTLELFPLRKEGFCSDGEKDKNISGIHCFYEFLPLKN

SEQ ID NO: 379 - DNA, 966 bp, Arabidopsis thaliana
atccacacacacacacatctctctctatataaccctaagtgtttggagatagcatcactagagaacacacacacaaagcatcaatatttgtctgaacggagaatgagtcctgtggcttcaacgaggtggtgtccgacgccggagcaactgatgatcttggaagagatgtaccggagtggtatacggactccgaatgcggtgcagatacaacagatcacagctcacttggcgttctatggaagaatcgagggcaaaaacgtcttttactggttccagaaccataaggctagagatagacagaagctgaggaagaaactagccaagcaacttcaccagcaacaacatcaacttcaactccaacttcagcagatcaaaccaaaaccaatatcatcgatgatttctcaaccagttaataagaatatcatcgatcatcacaatccttatcatcatcaccatcataatcatcatcataatcatcatcgtccatatgatcatatgtcctttgattgctgctctcatccttctcccatgtgtcttcctcatcagggaactggagtaggagaagctccaagcaaagtgatgaatgaatattactgcaccaaaagtggagctgaagagatattgatgcaaaaatcaatcacgggtccaaactcatcgtacggtcgagattggatgatgatgatggatatgggcccacgaccatcatatccctcatcatcatcatcacccatttcatgttgtaacatgatgatgagcagtccaaagataccattgaaaaccctggaacttttcccaatctcatctatcaactccaaacaagacagtaccaaactttaaagaaaagacaacaaatacaaaagagattctgcaggtgtttcattcatgtatcactgtatgatgtgtcaaaggctaagaagaaaacacgtgtacttgagggtaaagtaatagccgttggatataattcgt

SEQ ID NO: 380 - protein, 244 aa, Arabidopsis thaliana
MSPVASTRWCPTPEQLMILEEMYRSGIRTPNAVQIQQITAHLAFYGRIEGKNVFYWFQNHKARDRQKLRKKLAKQLHQQQHQLQLQLQQIKPKPISSMISQPVNKNIIDHHNPYHHHHHNHHHNHHRPYDHMSFDCCSHPSPMCLPHQGTGVGEAPSKVMNEYYCTKSGAEEILMQKSITGPNSSYGRDWMMMMDMGPRPSYPSSSSSPISCCNMMMSSPKIPLKTLELFPISSINSKQDSTKL

SEQ ID NO: 381 - DNA, 1325 bp, Arabidopsis thaliana
agccttttcatctctcttgcatcacaagtaaacctctcatcattcatttccacacagcactgaaactcgagcatttgctctctcgaatcccatttccctagctaaaaggttcggaattccacaacaacaacaaaagacctattttgtgaatcttttctctaaattaagagttattagggcaaatttctacatagcatgggctacatctccaacaacaacctcatcaactatttgcccctctctactactcaacctcctcttcttctcacccactgtgatattaacggcaatgatcaccatcagctcataaccgcatcatcaggagaacacgatattgatgaacggaaaaacaacattcctgcggcggcgactttgagatggaatccgacgccagagcagatcacgacgctagaagagctttacagaagcggaacacggacgccgacgacggaacagatccaacagatagcatctaagcttcgtaaatatgggagaatcgaagggaagaacgttttctattggtttcagaatcataaggctagagagagactaaaacgccgccgtcgtgaaggtggtgctattatcaaaccacataaagacgtcaaggattcatcatcaggtggtcatcgagttgatcagacaaagctctgcccatcttttccacacacaaaccgaccacagccacagcatgaattagatcctgcgagttacaataaagacaacaatgctaataatgaagatcatgggacgactgaagaatctgatcagagggcatcagaggttggtaaatacgccacatggagaaatcttgttacttggtcgataactcaacaaccggaagagattaatatcgacgaaaatgtcaacggagaagaagaagaaacgagggacaaccggactttaaatctctttccggttagggagtaccaagagaaaacaggccggttgatagagaagacgaaagcatgcaactactgttactactacgagttcatgcctctgaagaactgaaacaaaaaacccatgtgtgaataataaataggactttaatgaaggttttatttgttgttttgtccacgaatggtaagtgatgtgttcttataatagaagagaagcgtttgaagatggagacgtgtagtaaatgttatataggagcgtttgaagattattattgttagttattacccaaatgagaaggtggaccatgttggggcttgggtttggagttgcaactatctatacatatgtctgaaagtgaaactgaaagcttcgatggttccttgtcaatgtaaggaatatatattaattagatgtttgttagtaat

SEQ ID NO: 382 - protein, 271 aa, Arabidopsis thaliana
MGYISNNNLINYLPLSTTQPPLLLTHCDINGNDHHQLITASSGEHDIDERKNNIPAAATLRWNPTPEQITTLEELYRSGTRTPTTEQIQQIASKLRKYGRIEGKNVFYWFQNHKARERLKRRRREGGAIIKPHKDVKDSSSGGHRVDQTKLCPSFPHTNRPQPQHELDPASYNKDNNANNEDHGTTEESDQRASEVGKYATWRNLVTWSITQQPEEINIDENVNGEEEETRDNRTLNLFPVREYQEKTGRLIEKTKACNYCYYYEFMPLKN

SEQ ID NO: 383 - DNA, 932 bp, Arabidopsis thaliana
taacactatcatttcacacttatcttcctctatatatacatagcttaagtcttgtaacgagaaaggcatgcatagcatttgctagttttaacatatagcaatgaaggttcatgagttttcgaatgggttttcttcatcgtgggatcaacatgactcgacatcatcccttagcctaagctgcaaacgcctccgtcctctcgcccctaagctctccggcagccctccctcccctccttcttcttcctccggcgtcacttcagccacttttgaccttaaaaacttcattagacccgatcaaaccggtccgacaaaatttgaacacaaacgagaccctcctcatcaattggagacgcacccgggagggacaaggtggaacccgactcaagaacagatagggatacttgagatgttgtacaaaggtggaatgcgtactcctaatgctcaacagattgagcatatcacattgcaactcggtaagtacgggaaaatcgaagggaaaaatgtgttctattggttccagaaccacaaagcccgcgagagacagaagcagaagaggaacaacctcatcagcctaagttgccaaagcagcttcacgaccactggtgtctttaatccgagtgtaactatgaagacaagaacatcatcgtcactagacattatgagagaaccaatggtggagaaggaggagttagtggaagagaatgagtacaagaggacatgtaggagctggggatttgagaacttggagatagagaacaggagaaacaaaaatagtagtactatggcaactacttttaataaaatcattgacaatgtaaccctcgagctttttcctctccatcctgaagggagatgaagtcatgaaggtgaggcagaaaattgtggaattcttatgtagatctggtttaggttcagaggaatcaattggtatc

SEQ ID NO: 384 - protein, 251 aa, Arabidopsis thaliana
MKVHEFSNGFSSSWDQHDSTSSLSLSCKRLRPLAPKLSGSPPSPPSSSSGVTSATFDLKNFIRPDQTGPTKFEHKRDPPHQLETHPGGTRWNPTQEQIGILEMLYKGGMRTPNAQQIEHITLQLGKYGKIEGKNVFYWFQNHKARERQKQKRNNLISLSCQSSFTTTGVFNPSVTMKTRTSSSLDIMREPMVEKEELVEENEYKRTCRSWGFENLEIENRRNKNSSTMATTFNKIIDNVTLELFPLHPEGR

SEQ ID NO: 385 - DNA, 1128 bp, Arabidopsis thaliana
tacaccatcatcatgtcctcctcaaacaaaaattggccaagcatgttcaaatccaaaccttgcaacaataatcatcatcatcaacatgaaatcgatactccatcttacatgcactactctaattgcaacctatcatcttccttttcctcagatcggataccagatcctaaaccgagatggaatcctaaaccggagcagattaggatactcgaatcaatcttcaattccggtactattaacccacctagagaggagattcaaagaatccggatccggcttcaagaatatggtcaaatcggtgacgcaaacgtgttttactggtttcaaaaccggaaatctcgagcaaaacacaagcttcgtgttcatcacaaaagccctaaaatgtcaaagaaggacaagacggttattcctagtactgacgctgatcattgttttggttttgttaaccaagaaaccggattatatccggttcaaaacaatgagttggtggtaaccgaaccggccggttttctatttccggttcataatgatccgagcgctgctcaatcagcgtttggttttggcgattttgttgtaccggtggtaacggaagaagggatggcattctctaccgttaataacggcgttaatttggagactaacgaaaattttgataaaattccggcgatcaatttatacggcggagatggaaatggcggtggaaattgttttcctcctttgactgttccattaaccatcaatcaatctcaagaaaaacgagatgtaggattatccggtggtgaagacgtcggagataatgtttatccggtgagaatgacggtgtttattaacgagatgcctatcgaagtagtgtctggattattcaacgttaaggcagctttcggaaacgatgccgttttgatcaactcgtttggccagcctattcttacagatgaatttggtgttacttatcaacctctccaaaatggcgcaatctattatcttatttagaagatattgaaaagcaaatgttatggtgctatggataaatattaatataataataaaagatttctgcgatttatttagttattaattatataagaatttcatttcttatcttttaaatttatgaacaatttacaggac

SEQ ID NO: 386 - protein, 325 aa, Arabidopsis thaliana
MSSSNKNWPSMFKSKPCNNNHHHQHEIDTPSYMHYSNCNLSSSFSSDRIPDPKPRWNPKPEQIRILESIFNSGTINPPREEIQRIRIRLQEYGQIGDANVFYWFQNRKSRAKHKLRVHHKSPKMSKKDKTVIPSTDADHCFGFVNQETGLYPVQNNELVVTEPAGFLFPVHNDPSAAQSAFGFGDFVVPVVTEEGMAFSTVNNGVNLETNENFDKIPAINLYGGDGNGGGNCFPPLTVPLTINQSQEKRDVGLSGGEDVGDNVYPVRMTVFINEMPIEVVSGLFNVKAAFGNDAVLINSFGQPILTDEFGVTYQPLQNGAIYYLI

SEQ ID NO: 387 - DNA, 750 bp, Arabidopsis thaliana
cgtaaaacagttgaggactttacatctgaacatgtctttctccgtgaaaggtcgaagcttacgtggcaacaataacggaggaacggggacgaagtgcgggagatggaatccaacggtggagcagttgaagatattgactgatctgtttcgagccggtcttagaactccaacaactgatcagattcagaagatctctacggagctcagtttctacggcaagatagagagcaagaatgttttctattggtttcagaatcataaggctagggagaggcagaaacgtcgtaaaatctccattgattttgatcatcatcatcatcaaccatcaactagagatgtttttgaaataagcgaagaagattgtcaagaggaagagaaggtgatagagacattacaactctttccggtgaattcatttgaagactccaactccaaggtggacaaaatgagagctagaggcaataaccagtaccgtgaatatattcgagagaccaccacgacgtcgttttctccatactcatcatgtggagctgaaatggaacatccaccgccattagatcttcgattaagctttctttaagtcattgaccacaataacaaaagaaaaaaaacagatgctttagcctttaaaatgttgttgtattttgaattatgacatattatccgatgcatggtttatgagatattttccaatgcatggtttatcaaaaagttgtctcattttgtttgatataagaatctatgttatgg

SEQ ID NO: 388 - protein, 182 aa, Arabidopsis thaliana
MSFSVKGRSLRGNNNGGTGTKCGRWNPTVEQLKILTDLFRAGLRTPTTDQIQKISTELSFYGKIESKNVFYWFQNHKARERQKRRKISIDFDHHHHQPSTRDVFEISEEDCQEEEKVIETLQLFPVNSFEDSNSKVDKMRARGNNQYREYIRETTTTSFSPYSSCGAEMEHPPPLDLRLSFL

SEQ ID NO: 389 - DNA, 1232 bp, Arabidopsis thaliana
aaaatctctttactaccagcaagttgttttcttgctaacttcaaacttctctttctcttgttcctctctaagtcttgatcttatttaccgttaactttgtgaacaaaagtcgaatcaaacacacatggagccgccacagcatcagcatcatcatcatcaagccgaccaagaaagcggcaacaacaacaacaacaagtccggctctggtggttacacgtgtcgccagaccagcacgaggtggacaccgacgacggagcaaatcaaaatcctcaaagaactttactacaacaatgcaatccggtcaccaacagccgatcagatccagaagatcactgcaaggctgagacagttcggaaagattgagggcaagaacgtcttttactggttccagaaccataaggctcgtgagcgtcagaagaagagattcaacggaacaaacatgaccacaccatcttcatcacccaactcggttatgatggcggctaacgatcattatcatcctctacttcaccatcatcacggtgttcccatgcagagacctgctaattccgtcaacgttaaacttaaccaagaccatcatctctatcatcataacaagccatatcccagcttcaataacgggaatttaaatcatgcaagctcaggtactgaatgtggtgttgttaatgcttctaatggctacatgagtagccatgtctatggatctatggaacaagactgttctatgaattacaacaacgtaggtggaggatgggcaaacatggatcatcattactcatctgcaccttacaacttcttcgatagagcaaagcctctgtttggtctagaaggtcatcaagaagaagaagaatgtggtggcgatgcttatctggaacatcgacgtacgcttcctctcttccctatgcacggtgaagatcacatcaacggtggtagtggtgccatctggaagtatggccaatcggaagttcgcccttgcgcttctcttgagctacgtctgaactagctcttacgccggtgtcgctcgggattaaagctctttcctctctctctctctttcgtactcgtatgttcacaactatgcttcgctagtgattaatgatgcagttgttatattagtagttaactagttatctctcgttatgtgtaatttgtaattactagctaagtatcgtctaggttttaattgtaattgacaaccgttttatctctatgatgaataagttaaaatttta

SEQ ID NO: 390 - protein, 292 aa, Arabidopsis thaliana
MEPPQHQHHHHQADQESGNNNNNKSGSGGYTCRQTSTRWTPTTEQIKILKELYYNNAIRSPTADQIQKITARLRQFGKIEGKNVFYWFQNHKARERQKKRFNGTNMTTPSSSPNSVMMAANDHYHPLLHHHHGVPMQRPANSVNVKLNQDHHLYHHNKPYPSFNNGNLNHASSGTECGVVNASNGYMSSHVYGSMEQDCSMNYNNVGGGWANMDHHYSSAPYNFFDRAKPLFGLEGHQEEEECGGDAYLEHRRTLPLFPMHGEDHINGGSGAIWKYGQSEVRPCASLELRLN

SEQ ID NO: 391 - DNA, 369 bp, Arabidopsis thaliana
atgtcgtcgagaggattcaacattaaagctagaggattatgtaataacaacaacggaggaggaggaacgggggcgaagtgtggacggtggaatccaacggtggagcaagtgaagcttctgacagatctgttcaaggcgggactgcgaacaccgagcacggaccagattcagaagatctctatggagctgagtttctacggtaagattgagagcaagaacgtgttctattggttccaaaaccataaagctagagagagacaaaagtgccggaaaatctccaccgtcaagtttgatcatcgtcaagatacagatctttctaagcctcgccgagacaacgtacgtcgtcatcaactaccagcgaaaggttaa

SEQ ID NO: 392 - protein, 122 aa, Arabidopsis thaliana
MSSRGFNIKARGLCNNNNGGGGTGAKCGRWNPTVEQVKLLTDLFKAGLRTPSTDQIQKISMELSFYGKIESKNVFYWFQNHKARERQKCRKISTVKFDHRQDTDLSKPRRDNVRRHQLPAKG

SEQ ID NO: 393 - DNA, 870 bp, Glycine max
  misc_feature (860)..(860): n is a, c, g, or t
gcagcatgaaggtgcatcagttcacacgtggattaatctgggagcacgaacctttcctcacacttggctgcaagagattacgccctcttgctcccaagcttcccaacaccaaaactatcactacccctttcgatctcaagagcttcatcaggcccgaaagtggccccagaaaacccgtttcctctgacgacactaagaaggatccaccttcaccccaaggccagattgaaacgcacccaggagggacacggtggaatcctacgcaagaacagataggcatattggagatgttgtacaaaggagggatgcgaactccgaatgctcaacagatagagcagatcactgtccagcttggaaagtacggcaagatcgaagggaagaacgtgttctattggtttcagaatcacaaagcacgcgagagacaaaagcagaagcgcagcagccttgcatcttctcatagtcctcgaactcccacaattcacagtgttgttactttggagacaacaaggggggaagtggtagagagagatcacgaggaagatagtccgtacaagaagaagtgcaggagatgggtatttgactgcttggaagaacaaaacatgtcatcaccttgtgaacaagaggaacatagaactctggagctttttccattgcacccggaaggcagatgaaggggtttgagtttgattgaccatttatctatcatttttcactttgctttagttccgaatcgcagctgattattgaatgaatgtggtttaattaatttgctttacttttcttttttctttgtattgggaaagaagaaagacaaagttgtctctgatctgtactcttccacttaatgctattcctgactntggaaccaaa

SEQ ID NO: 394 - protein, 221 aa, Glycine max
MKVHQFTRGLIWEHEPFLTLGCKRLRPLAPKLPNTKTITTPFDLKSFIRPESGPRKPVSSDDTKKDPPSPQGQIETHPGGTRWNPTQEQIGILEMLYKGGMRTPNAQQIEQITVQLGKYGKIEGKNVFYWFQNHKARERQKQKRSSLASSHSPRTPTIHSVVTLETTRGEVVERDHEEDSPYKKKCRRWVFDCLEEQNMSSPCEQEEHRTLELFPLHPEGR

SEQ ID NO: 395 - DNA, 588 bp, Glycine max
  misc_feature (588)..(588): n is a, c, g, or t
ggaaagttttgaggatcagaatcaaaacatggacgagggcttgtcaggcttttgcattatatcatcatcaggaagtgtccgtggcaaaagtggcaccaagtgtgggcgttggaatcccaccactgaacaggttaaacttctaactgaactcttcagatcagggctccgaaccccaagcactgaccagattcaaaagatctccactcagcttaccttttatggcaagatagagagcaagaatgtcttctattggtttcagaaccataaggctcgggaaagacagaagaaccgtaagctctcctttgatgatcacaaggatctcatttgtagacaaaatgcaccttctacacaaagtaagtaatatatatcttcgttccaatatactttttcataactatttacaataaataataataataataaaatgaattaaacttctcatataatttaacatccgtttatacgattcaagtcttaattgtttttgagaatttttttatattgaacatatagagttctttctaataaaataacttctcagaaacacttttagtcttgacaaagagttggaccagagaatctctattn

SEQ ID NO: 396 - protein, 110 aa, Glycine max
MDEGLSGFCIISSSGSVRGKSGTKCGRWNPTTEQVKLLTELFRSGLRTPSTDQIQKISTQLTFYGKIESKNVFYWFQNHKARERQKNRKLSFDDHKDLICRQNAPSTQSK

SEQ ID NO: 397 - DNA, 745 bp, Glycine max
ctctagagcggcgtgcgtgtcggtctctctctctaaaattaagcatgaaggtgcatcagttcgcacgtggattctgggagcacgaaccctccctcacactcgggtgcaaacgcttacgcccccttgcccccaagctttccaacaccgacaccatttctccacctcatcatcctgttacaaccttcgacctcaagagcttcatcaaacctgaaagtgcctccagaaaacttggaattggatcctccgatgataatactaataagagagacccatcttcaccccagggccaggctgaaacgcatattccaggagggacacggtggaatccgactcaagaacaaatagggatattggagatgctgtacagaggagggatgcgaactccgaatgctcaacaaatagagcagatcacagcacagcttagcaagtacggcaagatcgaagggaagaacgtgttctattggttccaaaaccacaaagcacgcgagagacagaagcagaagcgtaacaacctaggccttgctcatagtcctcgtactactctcaccacttcacccccctttagttgttgtgtaattaccactatggacaccacaaaacggggggaagtagtagaaagagaggaggaagatagcccgttgaagaagtgtaggagctgggcgtttgagtacttggaagaccaaagagaggaggaacatagaactctggagcttttcccattgcacccggaaggcagatgaagggg

SEQ ID NO: 398 - protein, 231 aa, Glycine max
MKVHQFARGFWEHEPSLTLGCKRLRPLAPKLSNTDTISPPHHPVTTFDLKSFIKPESASRKLGIGSSDDNTNKRDPSSPQGQAETHIPGGTRWNPTQEQIGILEMLYRGGMRTPNAQQIEQITAQLSKYGKIEGKNVFYWFQNHKARERQKQKRNNLGLAHSPRTTLTTSPPFSCCVITTMDTTKRGEVVEREEEDSPLKKCRSWAFEYLEDQREEEHRTLELFPLHPEGR

SEQ ID NO: 399 - DNA, 676 bp, Glycine max
gatggagagtcacagtagtgatgctgaggcggagaatgtaaggactcattcatcagtttcacggtggagtcctacaaaggagcaaatagacatgttagagaacctttacaagcagggaataaggactcccagcactgagcaaatacaacagattacctctaggctcagggcttatggtcacatcgagggaaagaatgtcttctactggtttcaaaatcacaaagctcgtcaaagacagaagctgatgaagcaacaaaccattgcatattccaatcgctttcttcgtgcctcccaccccatttgccaaaatgttgcctgcgctccatattgtttgcaacggagtggattcagctcttatcctcaacaatcgaaggtgcttgcaagtggaggtataagttcaactgggcctttaggcatgcaaagaatgtttgatggcatgcagagtagtgaacacccggattgtaaccgtgaagtcgtaactctctttcctcttcatcctaccggcattttgaaagatagaacaactcatcaagtgcctttccttgcttcaactactgttgttgctgttgatgaagatggtcatcttggaaatcagccctttttttaatgtttcactactgaaccaatggttgatagagtgattaggcgttaattgtcatctgacccacataactac

SEQ ID NO: 400 - protein, 201 aa, Glycine max
MESHSSDAEAENVRTHSSVSRWSPTKEQIDMLENLYKQGIRTPSTEQIQQITSRLRAYGHIEGKNVFYWFQNHKARQRQKLMKQQTIAYSNRFLRASHPICQNVACAPYCLQRSGFSSYPQQSKVLASGGISSTGPLGMQRMFDGMQSSEHPDCNREVVTLFPLHPTGILKDRTTHQVPFLASTTVVAVDEDGHLGNQPFF

SEQ ID NO: 401 - DNA, 555 bp, Medicago truncatula
atggaagagagcatgtcaggcttttgcatgaaatcatctggaagtagtaatttccatggtaaaagtggaagcagcagcactggcacaaagtgtggtcgttggaatccaacaacagaacaagttaaacttctgactgaacttttcagagcagggctcagaactccaagcactgatcaaattcagaaaatatccaatcaactcagtttttatggtaagatagagagcaagaatgtgttctattggtttcaaaatcacaaagctagagaaagacaaaaacgtcgtaaggtttcttttgatgatgacaaggatgtcatagttcatagagacaactctatgaatgcttcaacacaaaggtttgctgagatgtactcagagcctgatagagtgattgagactcttgagctttttccattgaactcatttggtgaatcagaatcagaaaagtggagtatgcatgcaaatgaatgcagggaaaatacaatgtttgcatacacatgtacaatgggagaacaaatggaacacccaccattggacttacggttgagttttgtgtaa

SEQ ID NO: 402 - protein, 184 aa, Medicago truncatula
MEESMSGFCMKSSGSSNFHGKSGSSSTGTKCGRWNPTTEQVKLLTELFRAGLRTPSTDQIQKISNQLSFYGKIESKNVFYWFQNHKARERQKRRKVSFDDDKDVIVHRDNSMNASTQRFAEMYSEPDRVIETLELFPLNSFGESESEKWSMHANECRENTMFAYTCTMGEQMEHPPLDLRLSFV

SEQ ID NO: 403 - DNA, 498 bp, Medicago truncatula
atgtggatggtgggttacagtgaaggtggtgagttcaacatggctgattatccattatgtggaaggaaactaaggcctctcatgtcaagaccagtcccaatcccagtccctactacttctcctaacaacacttcaactataactccttccttaaaccgcattcatggtggcaatgatttattttcacaatatcatcacaatctgcagcagcaagcatcagtaggagatcatagcaagagatcagagttgaataataataataatccatctgcagcagtggaagaattgtatagaagaggaacaagaacaccttctgctgagcaaatccaacaaatcactgcccagcttagaaaaattggaaaaattgaaggcaaaaatgttttctattggtttcagaatcacaaagccagagaaaggcaaaaacgacgccgtcaaatgttcttagtgaaaatgggcttttggagagtgttgttttcggttggttttggagagaaatga

SEQ ID NO: 404 - protein, 165 aa, Medicago truncatula
MWMVGYSEGGEFNMADYPLCGRKLRPLMSRPVPIPVPTTSPNNTSTITPSLNRIHGGNDLFSQYHHNLQQQASVGDHSKRSELNNNNNPSAAVEELYRRGTRTPSAEQIQQITAQLRKIGKIEGKNVFYWFQNHKARERQKRRRQMFLVKMGFWRVLFSVGFGEK

SEQ ID NO: 405 - DNA, 909 bp, Medicago truncatula
atggaacagcctcaacaacaacaacaaccacagacacaacaacattcaccaaacaatgggattatgggaagcagacaaagtagtacaaggtggacaccaacaacagatcagataagaatattgaaggatctttactacaacaatggaattagatcaccaagtgcagaacagattcagagaatctctgctaggttaagacagtatggtaagattgaaggcaaaaatgtcttttattggtttcaaaatcacaaagctagagaaagacagaagaaaaggttcacttctgatgttaatgttgttcccatcattcaaagagcaccaaacaacaatactattatttctgctgctaattggaaacctgatcatcatgaacaacaacaaaacattaatgttcataccaaccattctacttacaacatttcatctgctgggctttcttctgcttcatgttcttctgctgagatggttactgtaggccagattggtaactatggatatggatctgtccccatggaaaagagttttagggagtgtacaatttcagctggatgtagcagcagtcaagttggaagtaccataaaccctcacataggatggattggtcatcatgtcgatccatattcttcagcttatgccaacttatttgaaaaaataagaccaaatgaagaaatcatggaagaatatgatcaaggacaagaaaatggttcacctgaaattgaaaccctccctttattccctatgcatggtgaagacattcatggtggctattgtaacctcaaatcaaattcatctaactatggtggttggtatcaagctgaagatgctggattcatgtatggttctcgtactacttccttggaacttagcctcaactcttacggctgtaggtcaccagattatgctaattaa

SEQ ID NO: 406 - protein, 302 aa, Medicago truncatula
MEQPQQQQQPQTQQHSPNNGIMGSRQSSTRWTPTTDQIRILKDLYYNNGIRSPSAEQIQRISARLRQYGKIEGKNVFYWFQNHKARERQKKRFTSDVNVVPIIQRAPNNNTIISAANWKPDHHEQQQNINVHTNHSTYNISSAGLSSASCSSAEMVTVGQIGNYGYGSVPMEKSFRECTISAGCSSSQVGSTINPHIGWIGHHVDPYSSAYANLFEKIRPNEEIMEEYDQGQENGSPEIETLPLFPMHGEDIHGGYCNLKSNSSNYGGWYQAEDAGFMYGSRTTSLELSLNSYGCRSPDYAN

SEQ ID NO: 407 - DNA, 621 bp, Medicago truncatula
atgtctccacctggttcatcaagatggagccctacaactgaacaacttatgatcttagaggaactgtatagaagtggaattagaactcctagtgctgttcaaattcagcaaataactactcacctttctttctatggtaggatagaaggaaaaaatgttttctattggtttcagaatcataaggctagggatagacagaagttaagaaggaaacttaacaaacaactgcagctacagcagcagcagcagcagcaacaacaacaacaactacatgttcatcattgtcaactcaatcataataatatgattagtaaccattttgttggtagcacttttggttacccttttggatctaatgcacaagacttttccttttttaactcacctagcttgctttttgagggatcagtatctgcaaatacatcagaaggggaaataaattgcaaatggaatggttataataaccaacaaagtttgatggagaagaaagatattgcattcagcaactatggttggacgacactcatggataatgttaatcatgaagcaccttcatgttgcactaaacctctcaagactcttgatctttttccactcacaacaacaagaatcaaagactag

SEQ ID NO: 408 - protein, 206 aa, Medicago truncatula
MSPPGSSRWSPTTEQLMILEELYRSGIRTPSAVQIQQITTHLSFYGRIEGKNVFYWFQNHKARDRQKLRRKLNKQLQLQQQQQQQQQQQLHVHHCQLNHNNMISNHFVGSTFGYPFGSNAQDFSFFNSPSLLFEGSVSANTSEGEINCKWNGYNNQQSLMEKKDIAFSNYGWTTLMDNVNHEAPSCCTKPLKTLDLFPLTTTRIKD

SEQ ID NO: 409 - DNA, 711 bp, Medicago truncatula
atgaaggtgcatcaattcacacgtggattttgggagcatgaaccttccctcacacttggttgcaagcgtttacgtcctcttgcacctaaaatttcttctaataacaccgataattctactactaacaccccttctctttcttttgatctcaagagtttcattagacccgaaactgctcccagaattagtctttcttcctctgatgataacaagaaagatccaccttcaccacaaagccaggttgaaacgcatattccaggagggacaagatggaatccaacacaagaacaaataggaatattggagatgttatacagaggtggaatgagaactccaaatgcacaacaaatagaacagattacagttcaacttagcaagtacggtaaaattgaagggaaaaatgtgttctattggttccaaaaccacaaagcacgcgagagacaaaagcagaaacgtaacagtcttggccttcctcatagtcctcgaactcccaccaccacacttgtgtctatgtcccccacctttagtactattacaactttggacaccccaaaaagggtgcaagtaatggaaagagatcaagaagatagcccattgaagaagagtaggagttggccatttgagtatttggaagagaaaaattggtcaatgtgcaaagtagaggaacataaaactctagagcttttcccattacacccagaaggcagatga

SEQ ID NO: 410 - protein, 236 aa, Medicago truncatula
MKVHQFTRGFWEHEPSLTLGCKRLRPLAPKISSNNTDNSTTNTPSLSFDLKSFIRPETAPRISLSSSDDNKKDPPSPQSQVETHIPGGTRWNPTQEQIGILEMLYRGGMRTPNAQQIEQITVQLSKYGKIEGKNVFYWFQNHKARERQKQKRNSLGLPHSPRTPTTTLVSMSPTFSTITTLDTPKRVQVMERDQEDSPLKKSRSWPFEYLEEKNWSMCKVEEHKTLELFPLHPEGR

SEQ ID NO: 411 - DNA, 1077 bp, Medicago truncatula
atgtggatggtgggttacaatgaaggtggtgagttcaacatggctgattatccattcagtggaaggaaactaaggcctctcattccaagaccagtcccagtccctactacttctcctaacaacacttcaactataactccttccttaaaccgcattcatggtggcaatgatttattttcacagtatcatcataatctgcagcagcaagcatcagtaggagatcatagcaagagatcagagttgaataataataataatccatctgcagcagttgtggtgagttcaagatggaatccaacaccagaacagttaagagcactggaagaattgtatagaagaggaacaagaacaccttctgctgagcaaatccaacaaataactgcccagcttagaaaatttggaaaaattgaaggcaaaaatgttttctattggtttcagaatcacaaagcaagagaaaggcaaaaacgacggcgtcaaatggaatcagcggctgctgagtttgattctgctcttgaaaagaaagacttaggcgcaagtaggacagtgtttgaagttgaacacactaaaaactggctaccatctacaaattccagtaccagtactcttcatcttgcagaggaatctgtttcaattcaaaggtcagcagcagcagcaaaagcagatggatggctccaattcgatgaagcagaattacagcaaagaagaaactttatggaaaggaatgccacgtggcatatgatgcagttaacttcttcttgtcctacagctagcatgtccaccacaaccacagtaacaactagacttatggacccaaaactcatcaagacccatgaactcaacttattcatttcacctcacacatacaaagaaagagaaaacgcttttatccacttaaatactagtagtactcatcaaaatgaatctgatcaaacccttcaacttttcccaataaggaatggagatcatggatgcactgatcatcatcatcatcataacattatcaaagagacacagatatcagcttcagcaatcaatgcacccaaccagtttattgagtttcttcccttgaaaaactga

SEQ ID NO: 412 - protein, 358 aa, Medicago truncatula
MWMVGYNEGGEFNMADYPFSGRKLRPLIPRPVPVPTTSPNNTSTITPSLNRIHGGNDLFSQYHHNLQQQASVGDHSKRSELNNNNNPSAAVVVSSRWNPTPEQLRALEELYRRGTRTPSAEQIQQITAQLRKFGKIEGKNVFYWFQNHKARERQKRRRQMESAAAEFDSALEKKDLGASRTVFEVEHTKNWLPSTNSSTSTLHLAEESVSIQRSAAAAKADGWLQFDEAELQQRRNFMERNATWHMMQLTSSCPTASMSTTTTVTTRLMDPKLIKTHELNLFISPHTYKERENAFIHLNTSSTHQNESDQTLQLFPIRNGDHGCTDHHHHHNIIKETQISASAINAPNQFIEFLPLKN

SEQ ID NO: 413 - DNA, 942 bp, Oryza sativa
atggagacgacgacgacgacgttgggcggcggcggcggcgggcgggcgggaggcttctccgatccgccgtctccgctctcgccgccgctgtcgccggcctcggcggcggcggcggcgctggcgaacgcgcggtggacgccgaccaaggagcagatcgcggtgctggaggggctgtaccggcaggggctgcgcacgccgaccgccgagcagatacagcagatcacggcgaggctccgggagcacggccacattgagggcaagaacgtgttctactggttccagaaccacaaggcccggcagcggcagaagcagaagcagcagagcttcgactacttcagcaagctgttccgccgcccgccgccgctgcccgtgctccacaggccactcgcgcggcccttccctctcgccatggcgccgacggcgatgccaccgccgccgccgccgccggcgacgacgacgacggccgcatgcaacgccggtggtgtgatgttcaggacgccaagcttcatgccggtcgcgacaaataacgccagctactacccgcagcagcagacgccgttgctgtacccagggatggaagtgtgtccgcacgacaagtccacggcgcagccaccggccaccaccaccatgtacctgcaggcaccgccgagcagcgcacacctcgcggcggcggctggccgcggcgcggcggaagcggaaggccatggccgccgcggcggcggcgccggtgggcgcgagaccctccagctgttccccctgcagcccaccttcgtgctgccggatcacaagccgctccgcgccgggagcgcctgcgccgccgtgtccccgacgacgccgtccgcgtccgcgtcgttctcgtgggagtcggagagctcggacagccccagcagcgaggcgcctccgttctacgacttcttcggcgtccattctggaggccgctga

SEQ ID NO: 414 - protein, 313 aa, Oryza sativa
METTTTTLGGGGGGRAGGFSDPPSPLSPPLSPASAAAAALANARWTPTKEQIAVLEGLYRQGLRTPTAEQIQQITARLREHGHIEGKNVFYWFQNHKARQRQKQKQQSFDYFSKLFRRPPPLPVLHRPLARPFPLAMAPTAMPPPPPPPATTTTAACNAGGVMFRTPSFMPVATNNASYYPQQQTPLLYPGMEVCPHDKSTAQPPATTTMYLQAPPSSAHLAAAAGRGAAEAEGHGRRGGGAGGRETLQLFPLQPTFVLPDHKPLRAGSACAAVSPTTPSASASFSWESESSDSPSSEAPPFYDFFGVHSGGR

SEQ ID NO: 415 - DNA, 603 bp, Oryza sativa
atggaggctcttagcgggcgagtgggggtgaagtgtgggcggtggaacccgacggcggagcaggtgaaggtcctgacggagctgttccgagcggggttgcggacgccgagcacggagcagatccagcgcatctccactcacctcagcgcattcggcaaggtggagagcaagaacgtcttctactggttccagaaccacaaggcccgcgagcgccaccaccacaagaagcgccgccgcggcgcctcctcccccgacagcggcagcaacgatgacgatggccgcgccgcagcccacgagggcgacgccgacctcgtcctgcagcctcctgagagcaagcgggaggccagaagctacggccatcatcaccggctcatgacatgctacgtgagggatgtggtggagacggaagcgatgtgggagcggccgacgagggaggtggaaacgctggagctgttcccactcaagtcgtatgacctcgaggtggacaaggtccggtatgtgaggggcggcggtggcgagcagtgcagggagatctcgttcttcgacgtcgctgccggccgggatccgccgctggagctcaggctttgcagcttcggcctctag

SEQ ID NO: 416 - protein, 200 aa, Oryza sativa
MEALSGRVGVKCGRWNPTAEQVKVLTELFRAGLRTPSTEQIQRISTHLSAFGKVESKNVFYWFQNHKARERHHHKKRRRGASSPDSGSNDDDGRAAAHEGDADLVLQPPESKREARSYGHHHRLMTCYVRDVVETEAMWERPTREVETLELFPLKSYDLEVDKVRYVRGGGGEQCREISFFDVAAGRDPPLELRLCSFGL

SEQ ID NO: 417 - DNA, 612 bp, Oryza sativa
atgcctcagaccccttcgacgcggtggtgcccgacgccggagcagctgatgatcctggaggagatgtacaggagcggcgtgcgaacgcccaacgcggcagagatccagcaaatcacggcgcacctcgcctactacggccgcatcgagggcaagaacgtcttctactggttccagaaccacaaggcccgcgagcgccagcgcctccgccgccgcctctgcgcgcggcaccagcagcaaccctcaccgccctcctccacggtgcctccggctcccactgctgctgctgccggtgccgtcgtgcaggtgcaccccgcggtgatgcagctacaccaccaccaccaccaccatcacccatacgctgcggccgccgctgcccaaagtcatcacctgcagcagcagcagcagcagcaagctgagtggccggcggcggtggactactgcagcactgcatcggcgtcagcgtcggcaactgctgctgacatggcgatcccgccgtgctgccggccgctgaaaacgttggagctgttcccgaccaagagcaccagcggcggcctcaaggaagattgctgcagcagctccaagtcctcctcttgctccacctccaccaattaa

SEQ ID NO: 418 - protein, 203 aa, Oryza sativa
MPQTPSTRWCPTPEQLMILEEMYRSGVRTPNAAEIQQITAHLAYYGRIEGKNVFYWFQNHKARERQRLRRRLCARHQQQPSPPSSTVPPAPTAAAAGAVVQVHPAVMQLHHHHHHHHPYAAAAAAQSHHLQQQQQQQAEWPAAVDYCSTASASASATAADMAIPPCCRPLKTLELFPTKSTSGGLKEDCCSSSKSSSCSTSTN

SEQ ID NO: 419 - DNA, 711 bp, Oryza sativa
atgaggcttcaccatctgcatgtggcctacctggatcacaaagcgtcgtcgtcctcgtcgtctccggcgccaccatccatctccccgtcgtcgatccccggatcggccgccttccctgctttctccttcaaatgcctccgcccgctcgcgcccaagatctcgctgccggagccgaggaagatgatcgcgccgccggacttcgtcgtccctcgcgccagaaacgcttccaagctgctcaactacactgtgcaggtgccggcggcggggacgacgaggtggaacccgtcggcggagcagataaaggtgctggagatgctgtaccgcggcgggatgcggacgccgaactccgtccagatcgagcggatcacggaggagctcggcaagtacggccggatcgagggcaagaacgtcttctactggttccagaatcacaaggcccgcgagcgccagaagcagaagcgcgccgccctcctcaccctcagcacgctcgacccttccttgctgcccgctaccgctaacgaaaccaaagaggcaccggagaagaaggagaaggacgtggaagatggattggcgagctgcaagcggcggtgcaaggcgtggggtgacggcgccggcgatggagacgcggtggtggcgacggaggcggccggcggctgcaccgacgaagtgaccctggagctcttcccgttgcatccccagggaaaagcttaa

SEQ ID NO: 420 - protein, 236 aa, Oryza sativa
MRLHHLHVAYLDHKASSSSSSPAPPSISPSSIPGSAAFPAFSFKCLRPLAPKISLPEPRKMIAPPDFVVPRARNASKLLNYTVQVPAAGTTRWNPSAEQIKVLEMLYRGGMRTPNSVQIERITEELGKYGRIEGKNVFYWFQNHKARERQKQKRAALLTLSTLDPSLLPATANETKEAPEKKEKDVEDGLASCKRRCKAWGDGAGDGDAVVATEAAGGCTDEVTLELFPLHPQGKA

SEQ ID NO: 421 - DNA, 870 bp, Oryza sativa
atggatcacatgcagcagcagcagcggcagcaggtgggtggagggggaggagaggaggtggcggggaggggtggtgtgccggtgtgccggccgagcgggacgaggtggacgccgacgacggagcagatcaagatcctgcgggagctgtactacagctgcggcatcaggtcgcccaactcggagcagatccagcggatcgccgccatgctgcgccagtacggccgcatcgagggcaagaacgtcttctactggttccagaaccacaaggcccgcgagcgccagaagaagcgcctcaccacgctcgacgtcaccaccaccaccgccgccgccgccgacgccgacgccagccacctcgccgtcctctccctctcgcctacagcagctggcgcgacggctccctctttcccgggcttctacgtcggcaatggcggcgccgtgcagacggatcaggccaacgtcgtcaactgggactgcaccgccatggcagccgagaaaaccttcctgcaggactacatgggcgtgagcggcgtcggttgcgccgccggggcggccccgacgccgtgggcgatgacgacgacgactcgcgagcccgagacgcttccactcttcccagtcgtcttcgtcggcggcgacggcgcgcatcgtcacgccgtccacggcggtttcccgtccaacttccagcgctggggttctgctgctgctacctcctacaccattacggtccagcagcatttgcagcagcacaacttttacagcagcagcagcagccagctgcacagccaggatgggccggcagcaggcacatccctggagctcactctcagctcctactactgctcatgctcaccttaccctgcagggtccatgtga

SEQ ID NO: 422 - protein, 289 aa, Oryza sativa
MDHMQQQQRQQVGGGGGEEVAGRGGVPVCRPSGTRWTPTTEQIKILRELYYSCGIRSPNSEQIQRIAAMLRQYGRIEGKNVFYWFQNHKARERQKKRLTTLDVTTTTAAAADADASHLAVLSLSPTAAGATAPSFPGFYVGNGGAVQTDQANVVNWDCTAMAAEKTFLQDYMGVSGVGCAAGAAPTPWAMTTTTREPETLPLFPVVFVGGDGAHRHAVHGGFPSNFQRWGSAAATSYTITVQQHLQQHNFYSSSSSQLHSQDGPAAGTSLELTLSSYYCSCSPYPAGSM

SEQ ID NO: 423 - DNA, 612 bp, Oryza sativa; identical to SEQ ID NO: 417

SEQ ID NO: 424 - protein, 203 aa, Oryza sativa; identical to SEQ ID NO: 418

SEQ ID NO: 425 - DNA, 1330 bp, Physcomitrella patens
  misc_feature (5)..(5): n is a, c, g, or t
cctgntggcctactgttgaataagggcttatggtggatacctaggcacccagagacgaggaacatctgcaagactaaacttgtgcaatcatctcaccctttctgaagggcggtgtgtcgttcaaagctctcttctcaattttgacatttgaccccatgtgaaagttcacagggtaaaacacatgcagagcaacgggatggaacctgaatctaggttaggtcgaatgatggatatgtctcctatagggtcgggattacgagggcagcctgtttctggtggagcaatgcttggtgtcgggccttccttggagaatccgttgccgcaacccatgtatactcggggatctgggcaggtgatgacagaggagcagctcgaaacattacgacgacagatttcagtgtatgcaacgatctgtcagcagcttgttgaaatgcacaaagcgagtgtttcccagcaagcatcccttccgggtattttagcaggtggtcagatcgtatctatggatcagatgactggaacacctactcataagtcgacagcaaggcagcgatggacccctagtcagcatcagctacaaatactggaaaagttgtttgagcaaggcagtggtacgcccaacaaagtgcgcatcaaagagattactgctgagctcagtcagcatggtgctatctcggagaccaacgtgtacaactggttccaaaaccggaaggctcgagccaaaagaaaacagcaactggttaccccgaaggatggtgaatctgaagctgattcagatggggagtcgccgaaggaaaaacgtacaagacagaaaggtgatcaaaaccaagatgaatcagtaggtatcggagatccacatggtggaggaagttttgatggagccggtaatggggtccctgagcaaaaagctgttaattctgaccaacaagatgccacatcatctgcactgctgcatccacaagcagatactaaacctgatatatcatcatttaacaggggtgctgggtttgatccttataatatgcctcaaggcattcctcccatgatgagttgagtggcatgctgctggtcttgtaacttcggtattaatggttggcaagggactacataagtctgagaatctacaagacatggagtctggctagaagtgtgtttcgctttgcatggcctctgatgtggtgtgctctcaagggcattgagccacccgcggataaagcagtagactttccattgcagcagttgtgctgctcccttgggtgtattagatagtagttatttatgaattcatcgtgtggttttgaagcacatcggtctatggaatacacacgtgact

SEQ ID NO: 426 - protein, 289 aa, Physcomitrella patens
MQSNGMEPESRLGRMMDMSPIGSGLRGQPVSGGAMLGVGPSLENPLPQPMYTRGSGQVMTEEQLETLRRQISVYATICQQLVEMHKASVSQQASLPGILAGGQIVSMDQMTGTPTHKSTARQRWTPSQHQLQILEKLFEQGSGTPNKVRIKEITAELSQHGAISETNVYNWFQNRKARAKRKQQLVTPKDGESEADSDGESPKEKRTRQKGDQNQDESVGIGDPHGGGSFDGAGNGVPEQKAVNSDQQDATSSALLHPQADTKPDISSFNRGAGFDPYNMPQGIPPMMS

SEQ ID NO: 427 - DNA, 851 bp, Populus trichocarpa
aactctaagtaaatttttagcaagaaagatatggatagtgatgatatggacgtggctggttctggtggagctccagggaattcaagatggaacccaacaaaggagcagattagcatgcttgagagcttctacagccaaggtatacggaccccaagtactgaaatgatagagcaaataacgagcaggcttaaagcttatggtcacatagaaggaaagaatgtattttactggtttcaaaatcacaaggcaagacaaagacagaagcagaaacaagagagcatggcttatatcaataactatcttcacaaggttcatcaacctgtgtttgcacctccttgcgcaaatgttgtctgcagcccatacttcccacaacagagcgaagtaatggggttttgtcaacaacatccgaaaatgctactccctagtaatttcaagatgaggccgaggtctgaagcaagaacctatgcttttaatggatatgaaccagcggcgccctatgggtaccacaatcgtatcacgatgaacaagggtgagaggaccctggtaaccatcaaccacaagagcagcagtgatcaagcaacgttgcctctctttcctttgcacccaacaggaactttagaaggagcaacgagtatctgtcctgtcggttcaactgatcctgctgagaattccacgaacactcctagctcctctgagattactactggcattgaagaacattctggtgattgcaaacctttctttgatttcttctatggaaaagattcttaagtttgagggttatcattgaatgtgaactaaaattgaagcttatgatagtgtctttgaattttgaaatgagatttgttact

SEQ ID NO: 428 - protein, 246 aa, Populus trichocarpa
MDSDDMDVAGSGGAPGNSRWNPTKEQISMLESFYSQGIRTPSTEMIEQITSRLKAYGHIEGKNVFYWFQNHKARQRQKQKQESMAYINNYLHKVHQPVFAPPCANVVCSPYFPQQSEVMGFCQQHPKMLLPSNFKMRPRSEARTYAFNGYEPAAPYGYHNRITMNKGERTLVTINHKSSSDQATLPLFPLHPTGTLEGATSICPVGSTDPAENSTNTPSSSEITTGIEEHSGDCKPFFDFFYGKDS

SEQ ID NO: 429 - DNA, 623 bp, Populus trichocarpa
cttgttttttttctgatttctcaatccatcatggaacctcaacaacaacaacaccaaaaccaacaacaaccaaatgaggataataatggtggtgccaaaggaaactttatttgcaggcaaaccagtacaaggtggactcccactactgaccagataagaatattgaaggaactgtactacatcaaaggtgttaggtccccaaatggagctgagattcagcagatctctgctaggcttagaaagtacggcaagattgaaggcaagaatgtattttattggtttcagaaccataaagctcgtgagaggcaaaagaaaagactcaccaatgaagtccccatgcaacaaagaactgcctggaaacctgaagattattactcttacaagtactccaacaggttttcttcggcttcttcatctgcaaataccggtgtggttactgttgggcagacagatagccatggatatggatcggtaaccatgcaggagaagaattcttgggtaagaaatgatgacccagaaaatgtcagtgacttatgcctttgataagatcttcttgatgatgctgaagttggtgtaatctaatatgcttttgctgttaggcattaaagtagaaagaaatctac

SEQ ID NO: 430 - protein, 170 aa, Populus trichocarpa
MEPQQQQHQNQQQPNEDNNGGAKGNFICRQTSTRWTPTTDQIRILKELYYIKGVRSPNGAEIQQISARLRKYGKIEGKNVFYWFQNHKARERQKKRLTNEVPMQQRTAWKPEDYYSYKYSNRFSSASSSANTGVVTVGQTDSHGYGSVTMQEKNSWVRNDDPENVSDLCL

SEQ ID NO: 431 - DNA, 914 bp, Populus trichocarpa
ctttgttttgttctggcttctcaatccatcatggaacctcaccaacaacaaccaaatgaggataataacggtggcgccaaagggaactttctttgcaggcaaaccagtacaaggtggaatcccactactgaccagataagaatattgaaggaactgtactacatcaaaggtgttaggtccccaaatggagctgagattcagcagatctctgctaggcttagaaagtacggcaagattgaaggcaagaatgtattttattggtttcagaaccataaagctcgtgagaggcaaaagaaaagactcaccaatgaagtccccatgcaacaaagaactgcctggaaacctgaagattattactcttacaagtactccaacaggttttcttcggcttcttcatctgcaaataccggtgtggttactgttgggcagacagatagccatggatatggatcggtaaccatgcaggagaagaattcttgggtaagaaatgatgacccagaaaatgactgttcagcaccagctggtggtagcaatggtgctggtagtggatccatgagcaatattaactatggatcaggggttgacattaactctcacagttcatcctatgctgtatttggtcaagaacaagaagcagctgcaaagattgagactcttcctctatttccaatgcttggtgaggacatcagtagctctttcaacatcaacaatatcaacccagacttttattacagtagcggctgtggctatggtgattatggcaatgacacttcttcccgtacttccctggaccttagtctctactcctacaatggccaaccacaagattattaatgtttgtgaatattatccctcttaattagtttgctaccttgagtaattctagtattcttgtgatattcctctaaggtacg

SEQ ID NO: 432 - protein, 267 aa, Populus trichocarpa
MEPHQQQPNEDNNGGAKGNFLCRQTSTRWNPTTDQIRILKELYYIKGVRSPNGAEIQQISARLRKYGKIEGKNVFYWFQNHKARERQKKRLTNEVPMQQRTAWKPEDYYSYKYSNRFSSASSSANTGVVTVGQTDSHGYGSVTMQEKNSWVRNDDPENDCSAPAGGSNGAGSGSMSNINYGSGVDINSHSSSYAVFGQEQEAAAKIETLPLFPMLGEDISSSFNINNINPDFYYSSGCGYGDYGNDTSSRTSLDLSLYSYNGQPQDY

SEQ ID NO: 433 - DNA, 911 bp, Populus trichocarpa
cttgttttttttctgatttctcaatccatcatggaacctcaacaacaacaacaccaaaaccaacaacaaccaaatgaggataataatggtggtgccaaaggaaactttatttgcaggcaaaccagtacaaggtggactcccactactgaccagataagaatattgaaggaactgtactacatcaaaggtgttaggtccccaaatggagctgagattcagcagatctctgctaggcttagaaagtacggcaagattgaaggcaagaatgtcttttattggtttcagaaccataaagctcgtgagaggcagaagaaaaggttcaccaatgatgtccccacgcaacaaagaactaccttgaaacctgaagattattactcttacaagtactccgggttttcttctgcttcttcatcttcaaatactggtgcggttactgttgggcaagcagataactatggatatggatctgtaaccatgcaagagaaaaaaaattgggtaagaaatgatgacccagaaaatgactgttcagtaccagctggtggtgaatccatgaacaacattaactatggatcacggggtggcatatatccttacagttcttcctatactgtatttgatcaagaccaggaagccgctgaaaagattgagactcttcctctatttcccatgcatggcgaggacatcagtacctctttcaacatcaacaacgttaacccagacttttattacagtagctggtatggctctgatgattatggcaatgccactacttctcgtacttccttggagcttagcctctactcctacaatggccagcaacaagattattaaagtctctgaacatcatccatctttagtttgctgcctcaagtaatcctagtcttctaattatgatattccacttaggtacc

SEQ ID NO: 434 - protein, 266 aa, Populus trichocarpa
MEPQQQQHQNQQQPNEDNNGGAKGNFICRQTSTRWTPTTDQIRILKELYYIKGVRSPNGAEIQQISARLRKYGKIEGKNVFYWFQNHKARERQKKRFTNDVPTQQRTTLKPEDYYSYKYSGFSSASSSSNTGAVTVGQADNYGYGSVTMQEKKNWVRNDDPENDCSVPAGGESMNNINYGSRGGIYPYSSSYTVFDQDQEAAEKIETLPLFPMHGEDISTSFNINNVNPDFYYSSWYGSDDYGNATTSRTSLELSLYSYNGQQQDY

SEQ ID NO: 435 - DNA, 650 bp, Populus trichocarpa
ctatttgtccttcaaggttgttttacgaaaatgtggatgatgggttacaatgatagtggtgacttcgacatgccagattctttcaatgacaggaagcttaagactctagttccgaggccactaccctccacaaacaacacttcaactgcctctggccatccttgccctggcagccgtcttcatagtaccgattttcttgctctaaatcagtaccatctgggactggcaagtatggttgatcaaggcataagagagttcaacacacagccagttgtaatgagctcaagatggaatccaacaccagaacagttaaggaccctcgaggagttgtatcgaagagggactagaacaccctcaactgaccagattcaagacataactgcacagcttcgtagatatggaagaattgaaggaaagaatgtgttctactggtttcaaaaccacaaggcgagagaaaggcaaaaacgtcgacgtcaaatggaatctgattctcttgatgatcatcagcaaaatggacatggtgttgaaatgtttgaaaggaaagaaccaggtaaaaagactccaatataaacaaccctttctagagttatccccaatcttgggcttgaaaaagagacaaatgtttgatatgtatggctttttgtgaattc

SEQ ID NO: 436 - protein, 374 aa, Populus trichocarpa
MWMMGYNDGGEFNISDSFNGRKLRPLVPRPIPSTNNTPTASSPPCLGSRLHNTDFFALNQYHLASMADQNKREFNTQPVVMSSRWNPTPEQLRTLEDLYRRGTRTPSTDQIQDITAQLRRYGRIEGKNVFYWFQNHKARERQKRRRQMESDSFDGHLQNGHGIEIFERKESEASRTGYEGEQTKNWAPSTNCSTLSEESVSISRATKGAMAEYCRPDGWMQLDEGELQHRRNFIERNATWEMMQLSCPSPTHQRNTISSTSSTTTMSKQGAAAAKLIKAHDLNVFIAPYRENGHHGALINQFNSSVINDGDESRGGTGESQTLQLFPLRSGGDGNNNIESINERESEVSVSAAEALNANNFAPCQFFEFLPLKH

SEQ ID NO: 437 - DNA, 752 bp, Populus trichocarpa
ttaccactccctttcattcagtccttcaccatgggaagcatgaaggtgcatcagttggcacgtggattttgggagcacgaaccctctcttacgcttggttgcaagcgtttacgccctcttgctcccaagctggccaacacagatcatagtgtaacctctttcgatctcaagagcttcatcagacccgatagcggtcctagaaagcttgcctcctctgacgagaagaaagattcccctcagggggaaacgcacccgggagggacacggtggaacccgacacaagagcagatagggatactagagatgttgtataggggaggaatgagaactcctaatgggcaacaaatagaagatatcacagcacaactaagcagatacggcaagattgaagggaagaacgttttttactggttccaaaaccacaaagcccgcgagaggcaaaaacagaagagaaacagccttggtttaagccatagtcctagaaccccatctcccattaccattatatctttggatactaggggagaagtggagaaagatgaggatagtccatacaaaagaaagtgtaggagctggtcatttgaatgctttgaattagaagaaagcaggtcatgtaaagaggagggagatagaactctggagcttttcccattgcacccggaaggaagatgaaggggtttgaaaaacaaaataaatctcattcaattttgttaatttcattgcgatgatctgcttttactttctttctttgt

SEQ ID NO: 438 - protein, 213 aa, Populus trichocarpa
MGSMKVHQLARGFWEHEPSLTLGCKRLRPLAPKLANTDHSVTSFDLKSFIRPDSGPRKLASSDEKKDSPQGETHPGGTRWNPTQEQIGILEMLYRGGMRTPNGQQIEDITAQLSRYGKIEGKNVFYWFQNHKARERQKQKRNSLGLSHSPRTPSPITIISLDTRGEVEKDEDSPYKRKCRSWSFECFELEESRSCKEEGDRTLELFPLHPEGR

SEQ ID NO: 439 - DNA, 1255 bp, Solanum lycopersicum
gatgagtagtagtagtcagtagttttcttctcttctctcccgcttttgctttactttctggttaccctttttttactcactctctctgtttacttcaaagatacaattttgtgatgacccttttaaggaattgactaaaacaaagaggaaaattatggattgggaaaaacagcagcagcagccaccggtgtcggcgccgcagcagacggcggaggaattgaacggaacagtcagtggtgggatgtttgtgaaagtgatgacggatgagcaaatggaagttttaaggaagcaaatcgctgtttatgctactatttgtgaacagcttgttgatttgcataaatccatggcttcacaacacgatcttgctggagccaggctgggaaatctgtactgcgatccactggtgacatctgctggtcataaaatcactggtagacaacgctggactccaacacctatgcaacttcagattcttgagcgcatatttgaacaaggcaatggaactccaaccaaacagaagatcaaagagataacttctgaattatctcaacatggccaaatttctgaaacaaatgtgtataattggtttcaaaataggcgtgctcgatcaaaaaggaagcaacaggttgcagcaacaaacaacactgaatcagaggtggagacagaggttgagtcgcccaatgaaaagaaaacaaagccagaggatctgcagtcttctcacatgcctacttcaatggctgaagatcttggctatgagaaccctgacgtgagctctggaatgcattcactagatccacgaaccagtaaacccgagcctatgtttccatcagacggtagttcaaaacctgctgcaagttatggccaaatgtccttctatggaatgtctaatccaagaatggaccagctaatgggaaagatggaagtgcctgggagctatcatccatatatacatgcagacgactacaacatgaccggctaactaccaatttggaaactaagtttcagcaaattagaatgagactagaagccccaaaactctagccggagtttttgatcctactgtgcgttagccactgattgatgatattctattacaggatgattctgtgtgtgaaaaaatgtacttatggaccatgcttataggaactatatagtaaatagtattttcattttgatttctccatttgctctgtaatttttacttttggaatgaagattttgtcaaaacatgatgcagggttgtgctctgaatttt

SEQ ID NO: 440 - protein, 274 aa, Solanum lycopersicum
MDWEKQQQQPPVSAPQQTAEELNGTVSGGMFVKVMTDEQMEVLRKQIAVYATICEQLVDLHKSMASQHDLAGARLGNLYCDPLVTSAGHKITGRQRWTPTPMQLQILERIFEQGNGTPTKQKIKEITSELSQHGQISETNVYNWFQNRRARSKRKQQVAATNNTESEVETEVESPNEKKTKPEDLQSSHMPTSMAEDLGYENPDVSSGMHSLDPRTSKPEPMFPSDGSSKPAASYGQMSFYGMSNPRMDQLMGKMEVPGSYHPYIHADDYNMTG

SEQ ID NO: 441 - DNA, 975 bp, Solanum lycopersicum
ggctccatgtacatgggatcatcatcaggaagcttaagtatgaaggtgcatcaattcacacgtggattcttagagcatgaagctgcttctccttcacttacacttggttgcaaacgtttaagaccacttgctcctaagctcaacacaaccaataatgataccacaactaccattgttactcctccttttgatcttaagagtttcattaggcctgaaagtagcaatagccctcctaaacttgcttacaatgaagacaagaaagactcctctcaggtggaatcacacccaggaggaacaagatggaatccaacacaagaacagatagggatacttgaaatgttgtatagaggtgggatgcgtacacccaacgcacaacaaatagagcaaatcacagcacaactaggaaaatatgggaaaatagaaggcaaaaatgtgttctactggtttcaaaaccataaagcccgtgaaagacaaaagcaaaagaggaatagtcttggccttagccaaagtccaagaacaccatcagccatagtcactagtcctttgtcatttgacactaggggagaagtagtgagggatgaagatagtccatacaagagaaagtgtaggggatggacatttgaatacatggaggaagaacaacaacaacaagatgaagaagaaattataaattgtagagaaaatggtgataggactcttcaactcttcccattgcatccagaaggcatgagatgatgaatttattataagaatattcttttttcctttttaattatgatctgactagcttccttttttttttttacttattttcgtcatctttaatttttactttcttcatttgcatgctttgtttccttttcttttatttttttccttggtttgggagaagagaaaagagaaaagagagacatatgaatcatcaaatctatgtagtaccaattcacttctcttgaaatttgggcattttagtgg

SEQ ID NO: 442 - protein, 242 aa, Solanum lycopersicum
MYMGSSSGSLSMKVHQFTRGFLEHEAASPSLTLGCKRLRPLAPKLNTTNNDTTTTIVTPPFDLKSFIRPESSNSPPKLAYNEDKKDSSQVESHPGGTRWNPTQEQIGILEMLYRGGMRTPNAQQIEQITAQLGKYGKIEGKNVFYWFQNHKARERQKQKRNSLGLSQSPRTPSAIVTSPLSFDTRGEVVRDEDSPYKRKCRGWTFEYMEEEQQQQDEEEIINCRENGDRTLQLFPLHPEGMR

SEQ ID NO: 443 - DNA, 738 bp, Sorghum bicolor
atgaggcttcaccatctccatgtggcttacttggacaaagcggcggcaggctcgccgccgccgtcgtctccaccatccatctcactagtagcatctcagagctcatctgctgccatccctctggccctccagcaatattgtctgcgcccgcttgcgcccaagatctccttccctgaggcgaggaagatggtcgtccttcctgagtttgctcgcgtcaggaatgcttcttcgaggctgctaaactgcacggtgcaagtgccgacggcgggtggcacgacgcggtggaacccgtcgccggatcagataagggtgctggagatgctttaccgcggggggatgcgcacgcccaactcgttccagatcgagcagatcacggaggagctcggcaagtacggccgaatcgagggcaagaacgtcttctactggttccagaaccacaaagcccgcgagcgccagaagcagaagcgagctgccctcctcacccttagcaccaccgccacttccacgctgctaccattatcaccagcagctgctgaaaccaaagatggagttgagacgaaaaaggaagaagcgtgtgaagatgcatcgagccgcaagcggaggtgcaggacctgggatggcgatgtcgtccatggtggcggcggcgacgatgccgctaaggaggtagctgacgactactacaccgatgatgtgaccctggagctcttcccgttgcgtcctcaagggaaagctagctag

SEQ ID NO: 444 - protein, 245 aa, Sorghum bicolor
MRLHHLHVAYLDKAAAGSPPPSSPPSISLVASQSSSAAIPLALQQYCLRPLAPKISFPEARKMVVLPEFARVRNASSRLLNCTVQVPTAGGTTRWNPSPDQIRVLEMLYRGGMRTPNSFQIEQITEELGKYGRIEGKNVFYWFQNHKARERQKQKRAALLTLSTTATSTLLPLSPAAAETKDGVETKKEEACEDASSRKRRCRTWDGDVVHGGGGDDAAKEVADDYYTDDVTLELFPLRPQGKAS

SEQ ID NO: 445 - DNA, 984 bp, Sorghum bicolor
atggcggccaatgtgggcgcgggcaggagtgccgtcggcggcggcggtggtggtggagcgggtggcactggcactgctgctgccagcggcagcgtggcgacgacagcggtgtgccgccccatcggctcgcggtggacgccgacgcccgagcagatcaggatactcaaggagttctactacggctgcggcatccggtcgcccaactcggagcagatccagcgcatcaccgccatgctgcgccagcacggcaagatcgagggcaagaacgtcttctactggttccagaaccacaaggcccgcgaacgccagaagcgccgcctcaccaacctcgacgtcaacgtgcccaccgccgcagccgccggcgcggccgacgccagcacccacctaggcgtcctctcgctgtcgtcgccttcaggcgcggcgcctccctcgcccaccctcggcttctacgccggcaatggcggcgccggctcgaccgtgctgctggacacgagttccgactgcgctgccatggccactgagacatgcttcctgcaggactacatgggcgtgatgggcacgggcagcgcggccgccgcgtcgccgtgggcatgcttctcgtcgtcgaacactatggcggcggccgcggcacgggcaccgacggtgacgcgggcgcccgagacgctccctctcttcccgacgggcggcgacgacagccagccccggcggccgcggcacggagtcccagttccagttgcagcaggcgaggccatccgcggcggcagcagcagcagcaggtacctgccgttctggggtgccgcgcccacaactgccagtgccacttccattgggatccagcagcaacaccagctgctgcagctgcaagagcagtacagcttttacagcaacgccatgcccggcaccggcagccaagatgcatcagcagcatccctggagctcagcctcagctcctggtgctccccttaccctgcagggaccatgtga

SEQ ID NO: 446 - protein, 327 aa, Sorghum bicolor
MAANVGAGRSAVGGGGGGGAGGTGTAAASGSVATTAVCRPIGSRWTPTPEQIRILKEFYYGCGIRSPNSEQIQRITAMLRQHGKIEGKNVFYWFQNHKARERQKRRLTNLDVNVPTAAAAGAADASTHLGVLSLSSPSGAAPPSPTLGFYAGNGGAGSTVLLDTSSDCAAMATETCFLQDYMGVMGTGSAAAASPWACFSSSNTMAAAAARAPTVTRAPETLPLFPTGGDDSQPRRPRHGVPVPVAAGEAIRGGSSSSRYLPFWGAAPTTASATSIGIQQQHQLLQLQEQYSFYSNAMPGTGSQDASAASLELSLSSWCSPYPAGTM

SEQ ID NO: 447 - DNA, 807 bp, Sorghum bicolor
atgccgtcgcagcagcagcagcagcagggccagcgaggtgagccgcaggtggtggcggggtcgacgcggtggtgcccgacgccggagcagctgatgatcctggaggagatgtaccgtggcggcctgcgcacgcccaacgcgtcgcagatccagcagatcacggcgcacctcgcctgctacggccgcatcgagggcaagaacgtcttctactggttccagaaccacaaggcccgcgaccgccagaagctccgccgcaggctctgcatgagccaccacctcctctcctgcgcccagtactacgccgccgcgcaggcgcaccacggccacggccacggcggcttcctcgccgccgcgccgccgccggtcgtcgcgccgtatatgctctccccgtcgacgtcgcccaccccggctgctgctgctgctgccgctgcggcgtacggctactactaccccaccacggccgccgccgccttcgctgcaccaccggcgccgacggcgagcaggtgcgccggaaacgccacccctccgtcgccgacgacccagctcttccactatcagggtggaggagggcttgtgccggcggctgaggcgctcggccggccggagtactcgtcgctggggaagctggacaacttcggcgtggcggcgcttgacgacgtcgtcgtgagctccacctccacggccgtcgacatgatggcgcctcctgggttcgaggtggcgccgccgccggctgccttctgccggccgctcaagacgctggacctcttccccggcgggctcaaagaagagcagcacgacgtggcctga

SEQ ID NO: 448 - protein, 268 aa, Sorghum bicolor
MPSQQQQQQGQRGEPQVVAGSTRWCPTPEQLMILEEMYRGGLRTPNASQIQQITAHLACYGRIEGKNVFYWFQNHKARDRQKLRRRLCMSHHLLSCAQYYAAAQAHHGHGHGGFLAAAPPPVVAPYMLSPSTSPTPAAAAAAAAAYGYYYPTTAAAAFAAPPAPTASRCAGNATPPSPTTQLFHYQGGGGLVPAAEALGRPEYSSLGKLDNFGVAALDDVVVSSTSTAVDMMAPPGFEVAPPPAAFCRPLKTLDLFPGGLKEEQHDVA

SEQ ID NO: 449 - DNA, 851 bp, Populus trichocarpa; identical to SEQ ID NO: 427

SEQ ID NO: 450 - protein, 246 aa, Populus trichocarpa; identical to SEQ ID NO: 428

SEQ ID NO: 451 - DNA, 816 bp, Arabidopsis thaliana
atgggctacatctccaacaacaacctcatcaactatttgcccctctctactactcaacctcctcttcttctcacccactgtgatattaacggcaatgatcaccatcagctcataaccgcatcatcaggagaacacgatattgatgaacggaaaaacaacattcctgcggcggcgactttgagatggaatccgacgccagagcagatcacgacgctagaagagctttacagaagcggaacacggacgccgacgacggaacagatccaacagatagcatctaagcttcgtaaatatgggagaatcgaagggaagaacgttttctattggtttcagaatcataaggctagagagagactaaaacgccgccgtcgtgaaggtggtgctattatcaaaccacataaagacgtcaaggattcatcatcaggtggtcatcgagttgatcagacaaagctctgcccatcttttccacacacaaaccgaccacagccacagcatgaattagatcctgcgagttacaataaagacaacaatgctaataatgaagatcatgggacgactgaagaatctgatcagagggcatcagaggttggtaaatacgccacatggagaaatcttgttacttggtcgataactcaacaaccggaagagattaatatcgacgaaaatgtcaacggagaagaagaagaaacgagggacaaccggactttaaatctctttccggttagggagtaccaagagaaaacaggccggttgatagagaagacgaaagcatgcaactactgttactactacgagttcatgcctctgaagaactga

SEQ ID NO: 452 - protein, 271 aa, Arabidopsis thaliana; identical to SEQ ID NO: 382

SEQ ID NO: 453 - DNA, 1295 bp, Populus trichocarpa
cacaaattgatgagcaatgcttttttataatgccaactttgtacaaaaaagcaggcttaaacaatgtggatgatgggttataatgatggtggtgaattcaacatatcagattctttcaatggcaggaagcttaggccactagttccaaggccaataccctctacaaacaacactccaactgcctctagtcctccttgccttggcagtcgccttcataacaccgatttctttgcactcaatcagtatcatctggcaagtatggctgatcaaaacaaaagagaattcaacacacagccagttgtaatgagctcaagatggaatccaacaccggagcagttaaggacccttgaagatttgtatcgaagagggactagagcaccctcaactgaccaaattcaagacataaccgcacagcttcgtagatatggaaggattgaaggaaagaatgtgttttactggtttcaaaaccacaaggcaagagaaaggcaaaagcgtcgacgtcaaatggaatctgattcttttgatggtcatctgcaaaatggacatggtattgaaatctttgaaaggaaagaatcagaggcaagtaggacaggttatgaaggtgaacaaaccaagaactgggctccctctacaaactgcagtacactatcagaggaatctgtttcaatatcaagggcaacaaaaggagcaatggcagagtactgtagaccagatggatggatgcaactcgatgaaggagaattacagcatagaaggaactttatagaaaggaatgccacgtgggagatgatgcagttgtcttgtccatctcccacccaccaaagaaacactatctctagtactagtagcactacaactatgtcaaaacaaggagcagcagcagcgaagctcattaaggctcatgacctcaacgtctttatagcaccttacagagaaaatgggcatcatggagcccttattaaccagttcaatagcagtgtcatcaatgacggggatgaatccagaggtggtactggggaatctcaaacccttcaaccgtttcctcttcgtagtggcggtgacggcaacaataatatcgaaagcattaacgagagagagagtgaggtatcagtttctgctgctgaagctttgaatgctaataacttcgctccttgccagttctttgagttccttccactgaagcactaatgatgaccatccaaagacccagctttcttgtacaaagttggcattataagaaagcattgcttatcaatttgttgcaacgaacaggtcactatcagtcaaaataaaat

SEQ ID NO: 454 - protein, 374 aa, Populus trichocarpa
MWMMGYNDGGEFNISDSFNGRKLRPLVPRPIPSTNNTPTASSPPCLGSRLHNTDFFALNQYHLASMADQNKREFNTQPVVMSSRWNPTPEQLRTLEDLYRRGTRAPSTDQIQDITAQLRRYGRIEGKNVFYWFQNHKARERQKRRRQMESDSFDGHLQNGHGIEIFERKESEASRTGYEGEQTKNWAPSTNCSTLSEESVSISRATKGAMAEYCRPDGWMQLDEGELQHRRNFIERNATWEMMQLSCPSPTHQRNTISSTSSTTTMSKQGAAAAKLIKAHDLNVFIAPYRENGHHGALINQFNSSVINDGDESRGGTGESQTLQPFPLRSGGDGNNNIESINERESEVSVSAAEALNANNFAPCQFFEFLPLKH

SEQ ID NO: 455 - DNA, 1325 bp, Arabidopsis thaliana; identical to SEQ ID NO: 381

SEQ ID NO: 456 - protein, 271 aa, Arabidopsis thaliana; identical to SEQ ID NO: 382

SEQ ID NO: 457 - DNA, 1891 bp, Zea mays
aggcaggcaaaagaaaagtccatacacacggagcgacacagggtgtggagcaggagggatcttgatctagatgcgagagagagagagagtgagagagaggaattggtggaggttgggagttgggggaccggcaagcaaggaacattccattacatgatattcatgaacctaagtttgatctcctctcccaccagtaatgagctctgcaaataaagcctagttagtaggtaccgcaccccccaccagctatagtagcttcacactgcatgcatgcctgttttagctacactaaacacgcactgtacgcacggtcacatcccataataactcaacaaggaatgaatgcatcgcagactgctctgtgcctgtgcctccccggtgggcctcttctactctagtagcacgtactactgtactcctagctagctcttgctgctcagcgcccactccctctcctctctagctagctgctagccagagcgcactaatctctagaaacgagtaagtacaccctctaaccaaacacatgcatcagaaagaacaacacgacgacgacacactagattgtagccatggatcggagagagatcagaacgaagctagctctagctgtcgtagctccagctaaattgatcgggagggggacgagctgagatcatgtcagcgtgtgtgtactacgtactactgcatgacattgacatgcatcaacgactgatggcgacgactagctaagtagtaattaatggtaacaacggcatatatgcgccgatcaggccacgtcgtgctgctcttcctcgagaccgccggggaagaggtctagcgtcttgagcggccggcagctgaaggcagccggcagcggcggcgccacctcgaaccctgcaaccggaggcgcccccatcgtgtcgacgacagcaccggaggtcgagctcaccacgacgtcgtcaagcgccacgccgaagttgtccagcttccccagcgagtactccggccggccgagcgcctccgtcggcacaagccctccgccaccctgatagtggaacagctgggtggtcggcgacgggggagtggcgttgccggcgcaccggctcgccggtgcagcgaaggcggccgtggcggggtagtagtagccgtacgctgcagcggcggcagcagcagcagcagccggggtgggcgacgtcgtggacggggagagcagctggtgcccgtacggcggcggcgcggcgaggaaggcggcgtggccgtggtgcgccgccgcggcgtagtactgcgcgcaggagaggaggtggtggctcatgcagagcctgcggcgcatcttctggcggtcccgggccttgtggttctggaaccagtagaagacgttcttgccctcgatgcggccgtagcaggcgaggtgcgccgtgatctgctggatctgcgacgcgttgggcgtgcgcaggccgccgcggtacatgtcctccaggatcatcagctgctccggcgtcgggcaccaccgcgtcgaccccgccgccacctgctggccctgctgctgctgctgctgcgacggcatgtcggtcgtcgtcgccgtcgtcgtctacctcctctagccaagtacgtacgcacctccagctaggatttgatggctggctgagctattggtgtacgagcactcgatcggtcgatgagtttgattggttggaagctgctgtctgtgaataagctagcaaaaaggttttggtttggtttggtttggttggttgggtgtgtggagactggagagagagggactgttgagagagacaaaatgggtactagggagggaggaggaggaggagcagatgggtgggtgtggacggaggtctggattggaagaagaggatgagacgacgaagaagcatgtagtggggagaggccg

SEQ ID NO: 458 - protein, 258 aa, Zea mays
MPSQQQQQQGQQVAAGSTRWCPTPEQLMILEDMYRGGLRTPNASQIQQITAHLACYGRIEGKNVFYWFQNHKARDRQKMRRRLCMSHHLLSCAQYYAAAAHHGHAAFLAAPPPYGHQLLSPSTTSPTPAAAAAAAAAAYGYYYPATAAFAAPASRCAGNATPPSPTTQLFHYQGGGGLVPTEALGRPEYSLGKLDNFGVALDDVVVSSTSGAVVDTMGAPPVAGFEVAPPLPAAFSCRPLKTLDLFPGGLEEEQHDVA

SEQ ID NO: 459 - DNA, 1324 bp, Zea mays
gcaaaggccagccctccagtgacaggcagatcgaggccacatggagacgccacagcagcaatccgccgccgccgccgccgccgccgcccacgggcaggacgacggcgggtcgccgccgatgtcgccggcctccgccgcggcggcggcgctggcgaacgcgcggtggaacccgaccaaggagcaggtggccgtgctggaggggctgtacgagcacggcctgcgcacccccagcgcggagcagatacagcagatcacgggcaggctgcgggagcacggcgccatcgagggcaagaacgtcttctactggttccagaaccacaaggcccgccagcgccagaggcagaagcaggacagcttcgcctacttcagcaggctcctccgccggcccccgccgctgcccgtgctctccatgccccccgcgccaccgtaccatcacgcccgcgtcccggcgccgcccgcgataccgatgccgatggcgccgccgccgcccgctgcatgcaacgacaacggcggcgcgcgtgtgatctacaggaacccattctacgtggctgcgccgcaggcgccccctgcaaatgccgcctactactacccacagccacagcagcagcagcagcagcaggtgacagtcatgtaccagtacccgagaatggaggtagccggccaggacaagatgatgaccagggccgcggcgcaccagcagcagcagcacaacggcgccgggcaacaaccgggacgcgccggccaccccagccgcgagacgctccagctgttcccgctccagcccaccttcgtgctgcggcacgacaaggggcgcgccgccaacggcagtaataacgactccctgacgtcgacgtcgacggcgactgcgacagcgacagcgacagcgacagcgtccgcttccatctccgaggactcggatggcctggagagcggcagctccggcaagggcgtcgaggaggcgcccgcgctgccgttctatgacttcttcgggctccagtcctccggaggccgctgatcatgggattgatgtagagcgagctcgagtgatgaaagccgagccagacgttcgtgtgatctcgagtcgtcgtcgatggacccggttgccgttgccttttgttgggttattgcatgcatggtgtgcttcatcaactactggaagaagcctgtgccgatcgaaccaaaacagtttgcattgttgagttccgtaccgtcctgtagcaacaatgtagcggagaaatgctactagtagcttctttttcatgcttccccatgttgatcgtttcttagtagtaatagccgagtaagagcaactcaggtagctctc

SEQ ID NO: 460 - protein, 324 aa, Zea mays
METPQQQSAAAAAAAAHGQDDGGSPPMSPASAAAAALANARWNPTKEQVAVLEGLYEHGLRTPSAEQIQQITGRLREHGAIEGKNVFYWFQNHKARQRQRQKQDSFAYFSRLLRRPPPLPVLSMPPAPPYHHARVPAPPAIPMPMAPPPPAACNDNGGARVIYRNPFYVAAPQAPPANAAYYYPQPQQQQQQQVTVMYQYPRMEVAGQDKMMTRAAAHQQQQHNGAGQQPGRAGHPSRETLQLFPLQPTFVLRHDKGRAANGSNNDSLTSTSTATATATATATASASISEDSDGLESGSSGKGVEEAPALPFYDFFGLQSSGGR

SEQ ID NO: 461 - DNA, 1006 bp, Zea mays
  misc_feature (12)..(12): n is a, c, g, or t
tgtcggtctccnggaagcaaccaaatcagaagcagaagctagagctactagtttttgcactcgaccatcgatctttcacaaaaccacacatatagctgaagcaaatatatcacttagcttgcttaactggcggtgtagtgtagctgcgatcgctgcaaactacagggtgtagtgatcgtcgatcggctacatatcatataccatggaggcgctgagcgggcgggtaggcgtcaagtgcgggcggtggaaccctacggcggagcaggtgaaggtcctgacggagctcttccgcgcggggctgcggacgcccagcacggagcagatccagcgcatctccacccacctcagcgccttcggcaaggtggagagcaagaacgtcttctactggttccagaaccacaaggcccgcgagcgccaccaccacaagaagcgccgccgcggcgcgtcgtcgtcctcccccgacagcggcagcggcaggggaagcaacaacgaggaagacggccgtggtgccgcctcgcagtcgcacgacgccgacgccgacgccgacctcgtgctgcaaccgccagagagcaagcgggaggccagaagctatggccaccatcaccggctcgtgacatgtaagctgcagcacgcacgtacacacatcgttagttactagctactatactacgacagctgcaacgtattacgtatatcgatcgtgctgttgacatcgacccgtacgtgctccgtgcatgcaggctacgtcagggacgtggtggagcagcaggaggcgtcgccgtcgtgggagcggccgacgagggaggtggagacgctagagctcttccccctcaagtcgtacggcgacctcgaggcggcggagaaggtccggtcgtacgtcagaggcagcgccgccaccagcgagcagtgcagggagttgtccttcttcgacgtctccgccggccgggatccgccgctcgagctcaggctctgcagcttcggtccctagcagtagcagctgatcgac

SEQ ID NO: 462 - protein, 151 aa, Zea mays
MEALSGRVGVKCGRWNPTAEQVKVLTELFRAGLRTPSTEQIQRISTHLSAFGKVESKNVFYWFQNHKARERHHHKKRRRGASSSSPDSGSGRGSNNEEDGRGAASQSHDADADADLVLQPPESKREARSYGHHHRLVTCKLQHARTHIVSY

SEQ ID NO: 463 - DNA, 1615 bp, Zea mays
gcaatctccacattccctgtcgcccgccggccccaagaccatgagctagctagagcacgcctttacctcgacatgcatggtcgtctcggtcgatcgcacaacactcaaaccctcgctacggctacgtacagcaccggccttcttagctttctttctccagcgatcgatcgtctccggccggccggccggtctccccatatataaactcgcgaggacgctcgatcccttctcgtctagtagtcgttagcatagccctagccctcagctttccgtttttacatatagtacgcactctctcgctcgatccgctacatcggtcgcgcgcctagctctacaaagtttgaagctttgtagctctacatctacagagttcattagcatgaggcttcaccatttccatgtggcttacttggataaagcggcaggctcgccgccgccgtcgtcgtcaccaccatccatctcaccagcatctcacagtcacagctcgtcgtctgctgccaccatcgtccctctggccctccagcaatactgtctacgcccgcttgcgcccaagatctccttccctgaggcgaggaagatggtcgtccttcctgagttcgctcgcgtcaggaatgcttcttcgaggctgctaaactgcacggttaggctataaaccaaagagagagcccatgtactagctagctaggaggacagtagtagaaacacatatctctagcatgcatggtgtacgtacgtatctcttaattttcattgtatcaaagctgcaggtgcaagtgccgccgacgacgacgacggtgggtggcacgacgcggtggaacccgtcgccggaccagataagggtgctggagatgctgtaccgcggggggatgcgcacgcccaactcgttccagatcgagcagatcacggaggagctcggcaagtacggccggatcgagggcaagaacgttttttactggttccagaaccacaaggcccgcgagcgccagaagcagaagcgagctgccctcctcaccctcagcaccaccaccactgcttccacgctgctaccaccagctgctgaaaccaaggagggagtggagacgaaaaaagaagaagcgtgtgaagatgcatcgagccgcaagcggaggtgcagggcctgggaagatgtcgtcgtccatggtggcggcgacgatgccggtacggaggtagctgacgactactacaccgacgacgatgtgaccctggagctcttcccgctgcgtcctgatcaggggaaataaagctagctagctagctagctaactaattaagtaaggcggacaagcgtacgtatatgcgtaaagtatatgcccgatccatgtctatgtcctttcggtcgttccatgcatgcatgttcccctggatcgggctgctgttcgtgcgaacactaaacactttggtcattggcgcgttgcatccacgtgtgtgctttgtatggtaatagtgtggactaatggacatgcttggattgctcaaacgtacgcttttagtgacagtgagtggtcaaaagtgtcattgactcaatagtacttcgtttaatttgttcagcctactacaccacccctgagacaaatcaaatcaagggaaggttagattg

SEQ ID NO: 464 - protein, 180 aa, Zea mays
MHGVRTYLLIFIVSKLQVQVPPTTTTVGGTTRWNPSPDQIRVLEMLYRGGMRTPNSFQIEQITEELGKYGRIEGKNVFYWFQNHKARERQKQKRAALLTLSTTTTASTLLPPAAETKEGVETKKEEACEDASSRKRRCRAWEDVVVHGGGDDAGTEVADDYYTDDDVTLELFPLRPDQGK

SEQ ID NO: 465 - protein, 1023 aa, Oryza sativa
CTGCCCTCCACTGCGGAAATTGCGGAGCATTCCAACCCAACCCGACCCGATCCATGGCCGCCGCCGCCGCCGGCGACTGGACCGTCGTCCGCCGCCGCGGCCGCCGCCGAGGTGACGCGGCGGGGGACGCCGCCTCGCAACCGGACGCTCCACCGCCTCTCCCCGTCACCCCGATCCCCTGGTCCCCCTCCGACCCCTCCCTGGACCCCGCGCACGTCTCCCGCCTCGTCGACCGCGCCCGCGCCGCCATCTCCCGCGTCGTCGCCTCCCGCCTCTACGGGCGCCTCCTCCTCCCGGGATCCCCGCTGCGGCGCCGCCTCGCCCTCCTCGCCCCCACGCGGCTGTCGCTTCTCGGTGTCGGCAGCTTCGAGAACTCCCCCTCATCCCGCCTCCAGCTCGCGCTCGCCGCGCTCCTCCGCCGCGACCTCCTCCTCCTCCCGGAATCCTCCGCCCACGCCGACCTCTTCGACCCCGTCCTCTCCGCGGCCGAGTGCGCCGCGGCGGCGGCGCTGGGCTTCACCGTGCCAGGCGTCAACGACGGGTGCCGCCGCCGCGCCGACGAGCCCACCCTCTTCTACATGCCACACTGCGAGGCGTCGCTCTACGATGCCCTCCTCGCCGCCAACTGGGAGCCACCCTCGCAGCTCCGCCATGTCTGCGTGCTCGGCAACAGCTTCCGCAACTACGCGATCCAGGCGGAGGAGAACAGATCGGGCCCTGCCGCCAGGGCCAAGCACGTCCTCGCGGCGGAGCGGTTCGCGTGGGAGGAGCGGGTCAGCGAGAAGGGCGGCGTGGATGACGACGACGACGACGTGTTCAACCGCGCGTTCAACGAAACGAGCTGGCATTTCTTCGAGGTGGATGACGCCGCCGACTTGGCTGCCGCCGTCGCCTCCACCGGAGGACGGAGATAAGTTCCGAAGTACTCTTCTTAATTTCAGTACTCGTGACTGTAATTGTAAGAGCATTGTTTGTCCAATTGGATGCTTTTGGTGATCAATACTCGATATTTACATCTTAATT

SEQ ID NO: 466 - protein, 286 aa, Oryza sativa
MAAAAAGDWTVVRRRGRRRGDAAGDAASQPDAPPPLPVTPIPWSPSDPSLDPAHVSRLVDRARAAISRVVASRLYGRLLLPGSPLRRRLALLAPTRLSLLGVGSFENSPSSRLQLALAALLRRDLLLLPESSAHADLFDPVLSAAECAAAAALGFTVPGVNDGCRRRADEPTLFYMPHCEASLYDALLAANWEPPSQLRHVCVLGNSFRNYAIQAEENRSGPAARAKHVLAAERFAWEERVSEKGGVDDDDDDVFNRAFNETSWHFFEVDDAADLAAAVASTGGRR

SEQ ID NO: 467 - DNA, 705 bp, Oryza sativa
atgcctcagaccccttcgacgcggtggtgcccgacgccggagcagctgatgatcctggaggagatgtacaggagcggcgtgcgaacgcccaacgcggcagagatccagcaaatcacggcgcacctcgcctactacggccgcatcgagggcaagaacgtcttctactggttccagaaccacaaggcccgcgagcgccagcgcctccgccgccgcctctgcgcgcggcaccagcagcaaccctcaccgccctcctccacggtgcctccggctcccactgctgctgctgccggtgccgtcgtgcaggtgcaccccgcggtgatgcagctacaccaccaccaccaccaccatcacccatacgctgcggccgccgctgcccaaagtcatcacctgcagcagcagcagcagcagcaagctgagtggccggcggcggtggactactgcagcactgcatcggcgtcagcgtcggcaactgctgctgacatggcgatcccgccgtgctgccggccgctgaaaacgttggagctgttcccgaccaagagcaccagcggcggcctcaaggaagattgctgcagcagctccaaaccatgggcgcgctcagtggtcgagtcgctaggagggagggagaggagcagtttggcggtggttgacagtggtggcgacatggatggaatagagcgaaggaggagagaattgggagagaggtag

SEQ ID NO: 468 - protein, 234 aa, Oryza sativa
MPQTPSTRWCPTPEQLMILEEMYRSGVRTPNAAEIQQITAHLAYYGRIEGKNVFYWFQNHKARERQRLRRRLCARHQQQPSPPSSTVPPAPTAAAAGAVVQVHPAVMQLHHHHHHHHPYAAAAAAQSHHLQQQQQQQAEWPAAVDYCSTASASASATAADMAIPPCCRPLKTLELFPTKSTSGGLKEDCCSSSKPWARSVVESLGGRERSSLAVVDSGGDMDGIERRRRELGER

SEQ ID NO: 469 - DNA, 942 bp, Oryza sativa; identical to SEQ ID NO: 413

SEQ ID NO: 470 - protein, 313 aa, Oryza sativa; identical to SEQ ID NO: 414

SEQ ID NO: 471 - protein, 9 aa, Artificial sequence
  specific domain 1
WMMGYNDGG

SEQ ID NO: 472 - protein, 10 aa, Artificial sequence
  specific domain 2
GRKLRPLVPR

SEQ ID NO: 473 - protein, 59 aa, Artificial sequence
  HD domain
WNPTPEQLRTLEDLYRRGTRAPSTDQIQDITAQLRRYGRIEGKNVFYWFQNHKARERQK

SEQ ID NO: 474 - protein, 6 aa, Artificial sequence
  specific domain 3
KNWAPS

SEQ ID NO: 475 - protein, 9 aa, Artificial sequence
  WUS-like domain
QTLQPFPLR

SEQ ID NO: 476 - protein, 8 aa, Artificial sequence
  specific domain 4
FEFLPLKH

SEQ ID NO: 477 - DNA, 2194 bp, Oryza sativa; identical to SEQ ID NO: 154

SEQ ID NO: 478 - DNA, 56 bp, Artificial sequence
  primer: prm11930
ggggacaagtttgtacaaaaaagcaggcttaaacaatgtggatgatgggttataat

SEQ ID NO: 479 - DNA, 50 bp, Artificial sequence
  primer: prm11931
ggggaccactttgtacaagaaagctgggtctttggatggtcatcattagt

SEQ ID NO: 480 - protein, 5 aa, Artificial sequence
  Motif II of OPT4-like polypeptide
KIPPR

SEQ ID NO: 481 - protein, 10 aa, Artificial Sequence
  Motif III of PLA2-like polypeptide
  misc_feature (2)..(2): Xaa is Thr or Ser
  misc_feature (3)..(3): Xaa is Val or Leu
  misc_feature (4)..(4): Xaa is Met or Ile
  misc_feature (5)..(5): Xaa is Ile of Val
  misc_feature (6)..(6): Xaa is Lys or Arg
TXXXXXNIPN

SEQ ID NO: 482 - protein, 6 aa, Artificial sequence
  Motif IV of PLA2-like polypeptide
  misc_feature (3)..(3): Xaa Pro or Ala
SPXRDG

SEQ ID NO: 483 - protein, 17 aa, Artificial Sequence
  Motif V of PLA2-like polypeptide
  misc_feature (3)..(3): Xaa is Cys or Ser
  misc_feature (12)..(12): Xaa is Met or Leu
  misc_feature (16)..(16): Xaa is Gln or Glu
NKXNVGYGFVNXTSPXA

SEQ ID NO: 484 - protein, 59 aa, Artificial Sequence; identical to SEQ ID NO: 473
  Motif VI of WOX1-like polypeptide

SEQ ID NO: 485 - protein, 6 aa, Artificial Sequence
  Motif VII of WOX1-like polypeptide
KNWAPS

SEQ ID NO: 486 - protein, 9 aa, Artificial Sequence
  Motif VIII of WOX1-like polypeptide
QTLQPFPLR

SEQ ID NO: 487 - protein, 8 aa, Artificial Sequence
  Motif IX of WOX1-like polypeptide
FEFLPLKH
